United States Patent Application Publication US 2004/0018514 A1 - sequence listing, part 3

SEQ ID NO: 1906 - DNA, 1299 bp, Listeria monocytogenes-4B
tagtggccaacagtgtgctggaaaatcgaaaaaattattgcatgatcttggcattgaagtagctggtcatgtacttgaaattggtggcactcgtgcgaacttaacacgtgattacgcggttagagaaatccaagaaacatccgaagcttctccagtgcgttgtttagacggcgtagcggcagaagaaatgatgcaaaaaattgatgatgcgaagaaaaatggcgacaccattggcggtatcgtagaagttgtagttggtggtgtcccagctggacttggtagctacgtacagtgggacaaaaaactagatgcaaaaattgcgcgtgcgattgtaagtattaatgcatttaaaggcgctgaattcggtgtcggttttgaagctgctagaaaacctggtagtgaagtgatggatgaaattttatggagtaaagaagatggctacacgagacgtacaaataaccttggtggattcgaaggcggaatgaccaatggtatgccaattgttgttcgtggcgtaatgaagccaattccaacattatacaaaccacttcaaagtgtggatattgattcaaaagaaacgtttaatgcaagtgtagaacgttcggatagttgtgcagtacctgctgcaagtgtggtagctgaagctgttgtcgcttgggaagttgcagttgctgtgttagaaaaatttgatggtgatcgttttgacacacttaaaaaacatgtggaggaacaccgaaacttaacgaaggagttttaaacatgccagaaattacagtccgtgctaaaagtaaaacatacccagtatatattaatgaattcgcattagaagatgtccgggaaaagtggacggagagcctagctaaattttcccacgtgtttgttttgacggacgagcatgtggcggaacttcataaagcaaagcttgacgcggttctcgctgatttacctgtagtcacttattatgtggcgccaaatggggaagaagcgaaaacgtttcgtgtatatgaagatgtgatgacaaaattgattgaaacaggtcttgatcgtaaagcggttttaattgcttttggtggaggcgttattggtgatttaggtggttttgttgcggctacgtatatgaggggcattcctttttatcaggtgcctacgacggttcttgcgcatgatagtgccgtgggtggcaaggttgcgatcaatcatccgcttggcaacacatgattgggaactttaccagccagagcagtatttatgataccagtcttgctccttgcaacggaatgccttggttgcgaatataca

SEQ ID NO: 1907 - DNA, 1315 bp, Listeria monocytogenes-4B
  misc-feature (1)..(end): n can be any nucleotide a,g,c or t/u
gcatctatcattatgtttctcgttggcgtgcaagttatttggagttcaattgttcatattatcgaaaaagaatttgcaacaccctcgatgttaactgctgttgtcgcgcttttttctggtgtatttatgtatgctatttacttatataatcatcgacttgcgaaaaaacttgatagccaagctgtgcgagctgctgcatatgataatcgttccgacgcatttgttagtttaggtgcgtttatcgggattattggggctgttcttggtgttccttggcttgattccgtgacggcctttttggtcggtattttgattgtttatactgctatcaaaattttctatgatgctgcacataccttgacagatggtttcgatgtttctaagctcgaaactattcatgatttaattgcttctgtacctgatgtcaaaaaagtaattgatattaaagcgcgaatgaatggaaataagatttggatcgatgcaactatcgctgtggatcctgaactaaatgtagttaaaagtcatgcaatcaccgaaatcgttgaacaaaaaattcgtaacgaatacgaaggtgcgttcactttagttcatattgaaccattttttgaataatattcattgtcaataatcgtaaagtcaactataatttagattaaagtatcatttgctgggagggaatattcgatggggcagagaaactaattcacataaattatctaactagaatgaaaaataggcaacaacacacttggaggagttctcttccaggacggtttttcttctatatagatagttttataataagcttatttatattaaactaggaggtgcctgccttagcagaaactatttctgtcaaggcgatttattgatattaaccattacatttttaattatagctttacttattgctctatcagcatttttcgtggctacagaatttgcgactgttaaaatgcgaccaagccgtttggaccaattaattgcggcgaatgattcacgcgcagtccgtcctagacctatttacaatcattcgaacgcttacttatcagcctgcccactcgggataacgcttctcctccttggactcgcttcggcgggggaatcttccgcccatgcggcctccctcccctctctccctcagtcgaactcccggccctttctcctcccatcctctctcccccatcgccttcctttcctcccgtccctccccccccctcccttgcctcctcccccccgttcctctctcttccctcttcccccccctccctccccctcccccccccntccctccccccgaaacaaaaaaaaaaca

SEQ ID NO: 1908 - DNA, 1743 bp, Listeria monocytogenes-4B
ccccctggaaatataaaacagacgatgattttaaagatatgatgaatatgcgtaaccaatttttcaatacgaatcctatggttggtggtttgatcttaggaatggatatggcgattgaagagcgcgaaaagaaagcgtcaaaagaagtcgtaactggtttgaaaacgggtttgatgggaccatttgctggtgttggtgatacgattttcggggttattttaccgacgatttttggatcaattgccgcatatatgggacttcaaggtaatgtgacaggtgtggttatctgggtattagttaatattttggttgtgggagcaagattcaccttacttcctctaggatataagcaaggtgcaaaactagtgacggaatttgcggacaggcttaacgcgttaaccgatgcagcgattctgctcggggtcacggtcgtcggggcattaataccaaccgtaatcaaagcaactgtcccattcgtttataaatcaggaaaagtagagctcaaaatgcaagacatgctcgatcaaatcatgccatcactcgttccagttttactcgtggcgctaatctatgcacttttaggccacaaaaaaatgacatctacgaaggctattttattagtaatggttattgcgattattttattcaacctaaaaattctaggttaaaatataaaaattggaggaatagacaaaatgggtttaacattttttgacaaagcgcgtgaattaacggaggaactagaaaaaacacaggcggaaagtattcatcaagcagcaaaactggtggcagacagcatcatgaacgacggaattattcaagcatttggtagtgggcactcatatgcggcagctattgaagtatgtgggagagcaggaggactaattccatcaaaagttattatggacccagctggcggttattatgaatcgattgagggtgttggttccttgcttactcatagattacaagcgaaaccgaatgatatattcttccttatatctaattcaggacgcaatccaatgggaattgagcttgcggaatggattaaatcacagggctgtaaattaattgttgtaacagcacttgatgcctcgcaaacagcagcttcaagacactcttctggaaaattgttgtacgagtttgcggatgttattttagacaatcgttcagtccaaggggatgcggcacttgaattagatggattagaaggaaaagtttgcggaacctcttcattctcagccgttctgcttctccaacaaacaatctatgaagcagtagaacttatgcttgaaaaaggctatacaccaccagtttatcgtagtgcaaatattgatggtggctatgaatacaattttgcgattgaagacaaattcgctgatcgtattttccacttctaataaaaacgagcgcgaaaatgaacattattttcgcgcttttttggaggatagaaaatgattttaaaagaagcctgtattgaaaatacaactaatctggtgaacgttattgaagctggagctaatcgagtggagctttgtgataatctagcggagggcggaacttctgtaagttacgggattgcgaaacatgtggtgaaaatttgtcatgaacaaaatgtaagtgtaatggcaatggtccgtccccgaaaaggcaattttgtttatacaaaagaagaaatttcagttatgattgatgacattttgatgtataagaaaatagcggttgatggcgtggtttttggct

SEQ ID NO: 1909 - DNA, 1938 bp, Listeria monocytogenes-4B
ccgtgaaataaatcacaaacaaataccccctttatttgattgtgtgaatttctccttttgattgcgctgtaagaagccgtggcattttgctacggctttttacgttattacgatactaactcagaattaaaggaggattaaagatggaatttgaagatgaaaaattactacgagaagtacttctttttgcgggaagtgtagatacgaagattaatgatatgtcacttgaagtgattgattttggaaatctgcgggactatacaaaaaatgaagtactactaacgctttattggttggaagagaatggctttttaacaagaaataataatattgcagaaaaaagatacacgttaactttaaaaggggaattactatatgatcgcttttctcaaatagaagagtaaaaggaaataattattaaccatggatggttgttgctattcatggtttttttgcgtttttaatttgtgaaaaagcaatctgttgttgacaatgataatcattatcaattaaaatgataattaacgtatccttttacataaacttttactccacttttattagtgggggttttttataaatagtagtttttattaaagaagggagatttaagtatgaagaaagttttagttttggctgcttttattgccttattcagtttttcgtttctttctacgggattaacggcacaagctgctcttaaggatggcacctattcggttgattatacggtactacaaggggaaagtgattccgtatctatggcgaatgactattttgataagcctgcaacggtaactgtaaatggaggtaaatctactgttagtttgcaagtgaaccatagtaagtggattactggtttatgggtcgaaggtagtgcggttagcgtgacttcgaaaaatacagcgaatgatactcgaaaagtgtcgtttcctgtgtcgactttaagtagtcctgttaatgcaaaaatcaaagtagatattgatgatgacgatttaaattatcatcatgagtatcaaatcaagttacgttttgatgaaggttctgctaaagcattagctggcgcggtaaagtcttctgataataacgatacagcaaccccagcaacaaaaagtgactcaagtaataaagtagcaaatccgaagtctagtgattctagccaaatgtttttatatggaattatttttgttgcagcaggggcagggttagttttacttaaaagacgtgcgatttttaaataaagggggattatgatgaagaaattatggaaaaaaggtttagtagctttcttggctttgacacttatttttcaattgatacctggttttgctaatgcggctgattctcgtctgaaagatggcggggaataccaagttcaagtgaatttttataaagataatttttggaaaacaacgaaagaatcttcagaggcagataaatatattgaccatacagcaacgattaaagtagaaaatggtcaaccttatatgtacttaacaattacaaatagtacttggtggcaaacaatggcggcttcaaaaaatggggctcgtgcagcacagccagcgcaagcggttgtcgcatccggatcgcccctcccctgctccccccgtctccgctcgcgcccccgccggctcccctgcctctctccccttctcctgtccccctccctcttccttgtgtgccctgcttccggcctcttttttttctccctctcctcttcggcccgcccgtcccccccccgccggtgctcgccccgccgtcctctctgtgtgtttcgctcccccggtccccccgggccccccccgccgctccctttcctttcccccttcctcgcgtcccctctctcccccctccccccctctcgccccgcccccccctttcccgtctcccttttcctccgcgggccgcgctttccacaccaaaaaaaaaaaaaaa

SEQ ID NO: 1910 - DNA, 1269 bp, Listeria monocytogenes-4B
cctggtggctaacacggccgccgtgtgctggaaagttgaacctttgcgcatttttgatggcgcatgtcgcaggaagattttcttgatatggaagctaatgcgtgtccgacttgcggatcttgcgcaggaatgtttacagcaaactcaatgaattgtttgatggaaatcctaggtatggctgttccgggaaatggtacaacacttgctggttctgacgcacgccgtgatcttattagagaatctgcttttcatttaatggatttagttaaaaaagatattcgtcctcgtgacattattacaaaagatgcgattgacgatgcttttgcgctagatatggcaatgggtggttcgacaaataccgtattacatacacttgcacttgcaaacgaagctggtgttgaagattatgatttggaacgtatcaatgatattgctaaacgtgttccctacctttccaaaattgcaccttcctcttcttactcaatgcatgatgttcacgaagctggcggtgtttcagccattgttaaagaactggttgatctaggtggcgcaatacatccagacagaatcactgttactggtaaaacgattcgcgaaaacgtagctgatgcaaaaattaataataccgatgttattcatccaaaagaaaatccgtacagcccagttggcggactttcgatgttgtttggtaacatcgcaccaaaaggagctgctatcaaagttggtggcgtagatccttccgtacaagttttcaaaggagaagcgatttgctttagttctcatgatgaggcggtggaagcaattgataaccataccgtccgcgaggggcatgtcgtggtcattcgctacgaaggtcctaaaggcggtccgggaatgcctgaaatgcttgcgccaacatctagtattgttggtcgaggtttaggaaaagatgttgctttgattacagatggtcgcttttctggggctactcgtggtatcgcagttggccacatttctccagaagctgcagctggtggtcctatcgcccttgttcatgacggcgatatcatcacgattgatttgccaaaccggacgttaaacgtggatgtttctgatgaggttttggaagaacgaagaaaagaattaccgaaatttaaagctaaagtaaaaactggttaccttgcaagatatactgcgcttgtaactagcgcccacactggtggcattttgcaaattccagaagattttatcgactaaaaaatgaggtgataagcgtgattgatacgacga

SEQ ID NO: 1911 - DNA, 2401 bp, Listeria monocytogenes-4B
ggtgaggaaggggcgcgggtgaccgacgccggaataaggaggaggagatagccttcgccgttttgttccccccgcttaaaaagaggagtgggcatttgggaaaaaaacaaggaattcggattatttgatgcggttcttatggctgtatgtgtcgttttagttgtggaatgtgccgcgccagcagcggcgataggatcatctcaatttttctggtggagtgcgttacttattttatttttcttaccatatggacttgtttcggcagaacttgggacaacctatgatgatgaaggcggaatctatgattgggtaaaacgggcatttggccgaaaatggggtgcgcgtgtcgcttggttatactggattaattatccgatttggatggcgagtttagcggtattgtttgtagaagttattacgcaaattttcccggtttcatttgggacgccggtttcgattttgattcagctcatttttgtgtggattgttgttattattagttgttatccagtgagtgatagcaaatggattcttaatatcgcagctttctgtaaagtggcaattatgctttgccttggtgtacttggaatttattttgcgatgacgaagggattggcgaatgatttctctggaaaagcattacttccaacttttgatttagagagtttgtcatttatttcagtcattttatttaatttcttaggttttgaagtggtaacaacgcttgcgagtgacatggaaaatcctaaaaaacaaattcctcaagcaatcatttatggtggggttttgattgcattcttctatttactagcagctttcggaatgggggcagcaattccgacttctgaactttcaacatccggtggtcttattgatagctttattatgctgattggcggagttaacccatttgttattattattgggattatgtttatgtatacattagtagcaaatttagtctcttgggcactaggcgtgaattatgtagcaatgtatgcagcgaaaaacaaagatttaccagctgtttttggaaaaacaaatccgaaaaatgatatgccaacgggtactagtattttaaatgggattgtagcttctgtattaatcgttgcggcaccacttattccaaatgaaaatattttctgggcattctttgcattaaatgtagttgctttactaggttcatatatcctaatgtttccagcatttttgaaattacgtaaggtggatccggaccgagaacttttttttaaagtgccaggtggcaaaatcttgctttacttaatgactttcgtaccaatgattttactcattattactttgattttctctgcagtaccattaaatggttcaagtgcagaattaaatgaaaaaatcccaatcttaattggaaccgttgtagcggtgattgttggtgaaatatgtatttggcttgctgggaaaagaaaagacaaaggagagataggaaatgagaacgattgatagttcttctaaaaaagatggatttagaatgcctggggaatttgaaaaacacgctggttgctatattatttggccagaacgaccagataattggcgcttaggagccaaacctgcgcaaaaagcttttgttgatgtggcgacagcgatttcccgttttgaaccagttacagttgttgcaagttcaagtcaatatgtaaatgcgagatatatgttgcctgatgaaattcgcgtagtggaaatggataacgacgatgcttgggtgcgcgattctggaccaacttttgtggtcaatgattctggtgacgtacgtggtgtggattggtcatttaactcttggggtggattggtcgatggtttgtacttcccgtgggataaagatgatcaagtggctcacgaggtgtgcgaattagagcgaaaagatcgccgtggcttacctgatcctgcgtcacaaggaggtgccgtgcctgtccatggtcaccgccccctccgcccgacctacgagtgctgtttcttctaccgtctgtgctctttctttttttttcccccgtttcgttcgcgtgctgtgacctcgtccttctcccctccttcttcccttttcccccggcgcctccgtcgtcgtcgcgtcgcgctgggggcggcgcgccgcctcccccgctttccctcctccccctttccccgccttcgtctgttgttctttgtcctggcgcgccttgctggtggtgcccctctccgtcccccttttctttgccggcgtctttcctcctttcctttttttgtgccccgcccggggttctctctttgtccccccgttctgttttcgctcctctcgctctctcccctttgttgtttgctcctcttttttgcgccccccgcgtgtcgccgttttgtctggttgattcaacacaaataaaaataaaag

SEQ ID NO: 1912 - DNA, 2252 bp, Listeria monocytogenes-4B
gaagaaatgcgtaactatgcgaaaaaagcagtaactgaaattaaacaaaacgataaaaaattccgtcacgataacattacttcacaaaaatgcccagactgcggtaagccgatgctaaaagtgaaaggcaaacgtggtacgatgctagtttgtcaggaccgtgaatgcggtcatcgtgaatctgggggaagaacgacgaatgctcgttgccctaattgtcataaacgaatggaaatgcgcggcgaaggtgataaacaaatttttgtatgtgtttgtggacaccgggagaaactatctgccttccaacaacgtcgtgacaaacagaaaaataaaaatgtatccaaaacagatgtagctaaattcatgaaaaaacaaaacaagcaagaagatgagccgtttaacaatcctatggcagaagcgcttgccaaattaaagctagataaataagaatggacaaagcggcccactcatattgagtgggtcgctttgtttgacatagtctgtcgtatacgaaacaataaaagagcaatcaatactgaaaaggagatgtttcacgtgaaacataatcaattaattattgaaacggatgtcccagctgaaatgcgcgatggtgtaacgctttacgcagatatatatcgcccagcagacgcgggggaatatccagttttacttacaaggttaccttatagtaaatcatacgggcttcactttattcgtcctaatattttggcggagcaaggttatgttgttattgttcaagatgttcgtggcagatatacgtcagaaggagattttgttccatacatagcagaagttgacgatggatatgatacgattgagtgggctgcgaacctgccttatgctaacggaaatgtcggcatgtttggtttatcttattatggttatacgcaaattttagccgcaattagcgggaacaaacatttgaaagccattgctccaattatggctcaaaatagcatgacagatgtttttaatgaccacgacggcgctttagaacttggaatgtgggaaacttggaatctagagtccatgcttccaaacatgctagcccgtacttataaaacgcaagatgaattagaagaagcagtgaacacattaatgaaaaatctagacaatttagacgcactttatcaatttaaaccttataaagactggccagcaatcggtcaaaatgaaatgccttacttctctgagttattaaattatgaaccaacacataaccattggcaaaaaatcgatgcaaaaagcaattatgataaaattaatgtgccaggtctccatgtagcaggctggtatgactgctttttagataaaacaatcgctaattttcaaaatggtcacttgcgaggtcttggagataagctcatcattggtccatggacgcatgctaatttcactcagatgattggcgaccgtgattttggaatggcggccactaaatggggagaggcgaatatgcatgctagacatatagaatggttcaatcattggctgaaaaaagagcctttaccagcatcagcgcctgttaattattttgtgatggggttaaatgactggaaaacagctgaaaactggcctcctcaaaatgcaaatatgacaccattatattttaaaaatgaaaaagtgagcgcagaattcacacctcctacaacatcttcagaagcaaaatttagctatgatccagaaaatccagtaccatcaaacggtggagggaccttacataaggcactacatgcagatggacctcgtgaccaacaacaaattgaacttcgtgaagacgttctttgctactcaacggagccactaaaagaagcaatcgaagttaccggaccaattcaagtgaaactctgggccaaatcagatgcacctaacacggattttacagcgaaattagcggatgtatccccagatggaacggcttttaacttagccgatggcatcatccgggcggccaagcaacctggcgaccttgtgcaaaataatattaatgaatacactatccaccttcgggccacaagtattatccccaaaaggccatcctatcccccgtggactttggtgttaggtctttgcccccatgttgtcccaatcccatcgcgggcgtcgcttggtcgcttgcggctctccgccagtccgccggcggcgccgcctcgtcgggcgcgcccccccccgctgtttcgatctcgcccccgccccccccgtccctgtccgtccgtgccctctctcctttt

SEQ ID NO: 1913 - DNA, 2012 bp, Listeria monocytogenes-4B
tgtggagtgttaaggaagcttgtgaagatgatttctttggaacgttagaaaaagtggcggaaatgggttatgacggtgtggagtttgctggttattacggtaaatccgctagtgaaattaaagcgaaattggctgaactcggactagaagtagcaggatctcatattattaaagaacagcttgaagcagacttagaaaatgtcattttgttcgaacgcgaattgggaaatgaatatattatttgcccatatgcagattttaaaacgaagcaagaatggcttgaattcggcggcagacttcgtgaaattacaacaactattcaacaagctgggatgcattttggttatcataatcatgctcacgaattagataaattagatgacgaaattattttggacagtttacttaaaaatgtaccagagatggttgcagaattagacacttactggattgagtatgcgggaattggggttattccttttatcgaaaaatatcgtaaccgggtaccactaattcatattaaagataaatcgagagcaaacaaggaaagcactattatcggtgaaggtgttttggatgtgcctggttttgttaaaacggcgcttcaatctggaacaacctggctgattattgaacaagaagcatttacgcaagatcagctaacaagtgtggccaaaggttatacgtatttagcgaatgtattggaggagaactaatatgacacgtgtaacagtatggaatgaatttttacatgaaaaagaagatgatgctgtgttggctatttatccggatggaattcatgggcaaatcgctagctttctagaaaaagcaggcattgaggcaggcacagctactttagaagaaccagaacatggccttactgaagaagtattagcgaatacggatgtactgatttggtggggacacatggggcatgaccgcgtagaagatagaattgtcgatcgtgtgcaaaaacgcgtgttagaaggcatgggacttgtcgtactacattctggtcatatgtcgaaaatctttatgcgcctaatgggaacaagctgtgatttaaaatggcgtgaagcaaatgaaagagagcgcctttgggtagttgacccgacgcatccgattgcaaaagggattggtgaatttatcgagttggacgaggaagaaatgtacggcgagcattttgatatcccgacacctgatgaactaattttcttaggttggtttgaaggcggcgaagttttccgaagcgggattacctacaaacgaggaaatggtcggattttctacttccaaccaggccatgaatcctatccaacctatcaccatccggatattcagcaagtaattattaacggcgtacattggtgcgcggaaggtcggaagaattatccggcatacggaaatcaccaaccacttgaaaaaatagggaggaaataaacatgaaattaggcgtatttacaccattatttgcaaatttatcattggatgaaatgttggataaagtaaaggcggcaggacttgatgctgtcgaaatcgggacgggcgggaaccctggaaatcatcactgtccaaccgatgaacttttagcgagtgaagccgcgcggaaggaatatttagaaaaatttactagtcgaggattaacaattagtgcttttagttgccacgataacccgatttctcctaataaagaggaagcggctgcatctgatgaaattttgcgcaaatcaatcaaactagcctctttaatgaatgttccggttgttaatacattttcgggaacagcgggagatagtgacgatgccaaagcgccgaactggccggttattccttggccaactgtttatagcgatattaaaacttggcaatgggaaacaaaattaatcccttactggaaagaaattggcgaacttgcagcagccagtggcgttaaaattggtattgaactgcatggtggtttcttatgccatacgccatataccatttgaaaactgcgggaagaacaaatgaag

SEQ ID NO: 1914 - DNA, 1686 bp, Listeria monocytogenes-4B
cacttaaatagagattgggacaaaaaaactcgtctctttctctatttggtgttgtataataacaataggttaagggagaattaggggggatataatgactatttcagaaaggcaacgttcattgttagaaaagcttaacgacagccaaaagacagtaacagcaaaagcactttcagaaatgttaggcgtttcttccaaaactgtgcgaaatgacattatgcaaattaaccagtcatttagttccacaatcatcgcatcaaaagctggaaaaggctactttctaacgccaaacgagcagctttcacaaataaatctaaccaaaaatagcgaaaatctacattttgaattattacgccatattatcgaacaagatcataccaatttctatgatttagcggatcaatttttcattagcgaatcgacgttagctcgtattattaaagaactcaacgcggttatcgctgaaaaagatacgtcgctttgtattattcgaaaaaacaacgaactactaaccgagggcggcgaagaagaaaagcgccgcatcttcaatctattcctcaatcaggaaatcgaaaaccatcaattaagcctagataaatacgccgattactttgattactgcaatctaaagcaactttccgagcttattattgcctaccacaaaaagaacgatttttttatgaatgatttctcgacgatttcgttcattttgcatatcgccgttttaattgagcgcattagtatgggtagctatatagagcgcactgctttactcgagcaagataaaactagtcttgaaatggcagagcatctagccgaaacgttagaaaatgaattgcaaatcaatattccaacgcaagaattaagctatatcgcccggctttattccggcaaactaacgacaacttcaaccattgacgcacaagtttttggcagcgttgtcactcggctccttgaagcagtggaccaaaatttccatatcgacttttccgctgatgaaaaaatagccacctatctagtggcccatatttcagccctatacaaaagagccaatcacaaacaatatttaaccaacccactcaccgaagaattaaaaaataagtttccatttatttataacgtcagcgtctatgcttcagcctttatccaaaaagagcttgcgatcactttcccagatgacgaaatcgcttatatcgcgctacattttttatccgcttcggaaacgattaatcacggtaaaaaaagaaaaatcctcttggtttcaccgtacggcgcaggtagccaacgtttaattcataatcaacttaagaaaattgccgatttttcgattgacttgctcgtttctcaatctatttttgatataaagcagttcaccttagacaaagaaatccatttaattatcaccgccgaaccattaaacctaacaactgacatcccagtctatcattacgatttacttttaacagaaacagatttgcagaaaatcaagcacattttagaaactaagcccaaagccgattcgatttccagaaaatttttcaaaaaagagctgttcttcccagaacaaaacttcaaatcaaaagaaggagtaattacgtttctttcgaacgagttaactgcattcgactactgcgactccgactatgtttcaaaagtgtgtgagcgcgaacaattatatagcacctg

SEQ ID NO: 1915 - DNA, 1544 bp, Listeria monocytogenes-4B
atgaaatcatcgaagaaattggcgtattatctgaaaatgcgcgtggttggcggaaggaattaaacaaaatcagctggaacggccgcccacctaaatacgatatccgcgactggtcagaagatcatgagaaaatgggaaaagggattacactaactgatgaagaagcagaagtactaaaaaaactgttagattgagggctggtgtaaagaatgagaatgtttgcttatgatatttacgaaccaattggtagaaaagatgaagatacttttccagtgatttttgctcttcatggttttggtggggacgagctagaaatggcgggacgactagaattattaatggatcgtttcgttgttgtttccatgcgtggagacgtagaatatggtccggcttacggtttttatcatatggtgacagaaggtgatcccaacccgcaagaggtagattatataagcctgcgtgtcgcacaatttattgataaaatttgtacggattacatttcaattgataaagaacaagtttttcttgcaggatttgatcaaggcgcagttctaacaatatccattatgcaaagctatggtggtcaatataaagcagcagccttgtaagcgggcgtttgccgtattatatggaagaaagacccgctaacttaatgttgaaagacaagcgaatttttatcggtcacggtatagaagatgctgttatccaaatttctgaagcagatgacatcgcccgacttttcgagaaaatgggttgtcacgtggagaagcatcgttattttatcggtcacaatgtaaacgaagcggaagaagatgacttatatagatggtttgaaagctttttgccaaaccaaccagtgaaaaataaataaaaaacagcgaccgcactcggtcgctgttttttagatatctaaagtaagaaagagcacttttaaataattcccctcaggaaagtttttatttaccgtgaaatctgcgggtaaggaatgagtttcaacaattttataagtacggtcgcttgtttggaaggcctccgcaattaattttttaaatgctttcataccgaatcctgcataatttgttgaagcaacgatggtgccgtttggtgcagtgatgtcaatgatttcacgaagcatagcagggtaatctttcgccgctcggaaagttactttttttgtgcgtgcaaagcttgggggatcaacaacaactaaatcaaaagttaattgtttgcgcgctgcatatttgaaataatggaaaacatcttctacgataatcgcttgctcgtttggatcaagaccatttacttctaattgttcttttgtcttgctgagcgaacgaccagccacatctacgcttgtcgttttactcgcgccaccaaataaagctgctaccgagaatgcccctgtatacgaaaatgtatttaagacattttttgaaacagaataatcctcactaattcttctccgcacatcccgttgatctagaaagatacctgtcatccaaccatcatctaaataagttgcataattaatgccattttcttta

SEQ ID NO: 1916 - DNA, 1394 bp, Listeria monocytogenes-4B
cacgttcacgttgaagaaaaataatgaagatttagagagtggtggagcaagcatatctaaggagcttacaaaacaattggggcttttgaacggatataaatgagtttttatagagctaagagacgattaaaagactgaaaaaaaagaaagtgaaaatttctaacatgtgataaaatagacctacaaataaaaagtcatacaacagaggtgaagagttgaaaaagagatggataatagtactaggaattacagtaataaccatttttggtttaggggtgaaattctatatggatgaagagaaattaaataaagaaatgatgaatgtagtttatagtgatgaagcgaaacaagtatttgaaaagaggctgacaaacttggatgcaaaagcattcacgaaagaaggtataattcaatcatatgaaattaataaagaaagtatagagagaaatccaatgagaggaataaatgttactttaattataaataaggatttagagtggtatattacctatactttaggaaaacagaacgacaaattagatggtgggggtgctagcatctctaaggagcttacaaagaaattggaacttaaggggagttaagatagtccagccaatactaactaagaaattaaacaaacgttaaaagactgaaaaaaaagaaagtgaaaatttctaacatgtgataaaatagacctacaaataaaaagcatacagcagaggtgaagagttgaaaaaaagatggataatagcactagcaattatagtaataaccatttttggtttaggggtgaaattctatatggatgaggagaaattaaacaaagaaatgatgaatgtagtttatagtgatgaagcaaaacaagtattcgaaaaaaggctgacaaatttagatccaaatgcttttacagaaaaaggtataattcattcttataaaattgaagaaggaagcgtagagcacaacccaatgggaggtatagaagtcggattaataattaataatgattcagaactaaatgtatcatataccttgagcaagaacaatggagagttaagtggtggtgcttcagttgtatctgaaaagctttctaaactattaggtcgttgggaggagtagggatgatggggcatgtaaatactgatcaagagagagtggaattggcaaaaaaagagtacagcaagttagaacttaagcaggaggtgaatatttcaatatccaatcgagaaaaaaagataggaaacgtatcccaaacaatcaacaacaaagcagccggacagcaaacctatatcatcacagaaaaatacacgccgcccacagcttcccatattgagagaagcaaagtaaaagaggtaacagttctttacagaggttccactgcacccactctggcaagt

SEQ ID NO: 1917 - DNA, 1531 bp, Listeria monocytogenes-4B
ttggtgaaacaattccagaggatgaaatagcgtacgtaacaatcttgttcggtggctatctttcacgcaaaaataatactttagttgaacgaaaaaaactcttaatcgtttgctccaaaggtgtcggaacgtcgcggatgattgaacggcaattatcgcaattacttggtgagcgagtagagatattagaaccaatttccatccgtgaatttgaaaaagggttatacgcaccagactttattgtgtcgactttgccaattatggaaccaaaagcaccagtttttatcgttagtccaattttgacagaagcgcagaaacaacaactgatgaaggcgattgccccgcacattttgcaaaaggactcggatgcgcgcatgttgtcttctgtgcttgatgtagtagatcaatatgccaaagtggaagaccgcgagaaattggcggcaaaactgaaatcggtattgttccaagtgcaatcagacagccaactagaaaaatctccaacactcgaagaacttttaccgaaagaacgaattacttttaaagaaagtgtggcggactggcgtgaagctatcctagttgcctcgaaatcgctgcaacaagaaggctacatttcgagaaattatcagcatgcgatgattgaaaatattgagaaactcggaccatacatcgttattgcgccagggattgcactgccacatgcgtctgtggatgacggggcataccgagtcggaatgagcttactgcgcttaaatcagccagtatcattttcaagtaaagcgaaagatcaagtgaagttaattattgtgctcgcttccattgactcctacacacatattaatgcgctgagccaactcactaatttaatcatgaaacatcacttgctagagcagattgaacaagcgacatcagcagcggaaattgccgcaatgttaacgatacaataagcaagaaagccagtggggcaccaagatgccgcgctggctttttgtatgctcgctaacaacaaaatgtaacagtctattttttgcactttcgaaaagaaaggaattgggcttttttaaacagttgcgctacagctataataagagtgtaagttattgatagcgctatcaattagttagaagggatgaagagatatgtcttttttggataaagagcttgtgaatctgcatggatcagctaagaatgctgacgaagctatcgtgcaagcaggagaattattagttaatgcaggttatgtgagcgagcagtacgtagaaaaaatggtggaatcttatcatgaaaatggtgcgtactttgtcattgcacctcaaatagccattccgcacgcaagaccaactgatggtgtggaaaactctgcagtatcactagtcgtactaaaagaaggcgtgaatttcggacacgccgcgaatgatcccgtacgattagtattcggccttgcagcaacttcaagtgaggcacatttgaaagtcattcaaaaaatcgtctccttgcttagtaacaacgataatattgaaaaaatgattcattc

SEQ ID NO: 1918 - DNA, 917 bp, Listeria monocytogenes-4B
cgacatgtcgctggaaaggcgctactggtgaatttgcatgaagaaacagattcatgcgtgggtaaattaaaaatatattttggctttgcggcaggtgttgggaaaacatatgccatgttaagtgacgccaaagatcaattagcagcaggtgtggatgtcgtggcgggttatattgaacctcatgctcgcgaggaaacgctgagaatgttagaaggaatcccgattattccaccaaaagcaattactcacaaaaatattgcgctcaaagaattcgatttggacgaagcgttgaaacggaagccggaacttattttggtagacgaactcgcacatacgaacgcatcaggtgtacgcaataagaaacgtttccaagatgtggaagaattgcttcaagcgggaattgatgtgtatacgactgtcaatgtgcaacatattgaaagtttaaacgatattgtagaaggcatcaccaaagtagctgttcgcgaaacgattcctgactatgtttttgatgaggcggaccgagttaaattaattgatattgaacccgatgaacttctaaaacggttagaacagggtaaaatttatcaaccggcgcgcgcaaaaacagctatgcagaacttcttcactagagaaaacttaaaactcttgcgtgaaattgcgatgcgaaaagcggccgaccgaattagtcacgaatacgatcaaacaggtgtttatccagagaaacgggcgagtagtaaatggttagtctgtattggaacgtcgccttcatctgcaaaactcattcgctggacagcgcgcactgccgaggctttccgcgcaccatggacggccctttatattgaaaatgaagaaaatgattatatgaccaaagcagagaaaaaatgtttacgggaaacgatggaactcgctgaacggct

SEQ ID NO: 1919 - DNA, 1753 bp, Listeria monocytogenes-4B
attgctccaacacgtgaacttgcaatccaagtttctgaagagctttataaacttagctatgacaaacatgtacgtgtgctagcggtttacggtggtagcgatatcagccgtcaaatccgttcacttaagaaaaacccacaaatcgtagttggtacgccaggacgtattttggatcatattaaccgtcgcacactgaaactagaccacgtggaaacacttgtactagatgaagcagacgaaatgctaaacatgggcttcattgatgatatcgaaactattctaaaagaagtaccagcagaacgtcaaactttactattttctgcaacaatgcctgatccaattcgccgtatcggtgaacgtttcatgcatagcccagaacttattcgcattaaagcgaaagaaatgactgcactattaattgaacaattcttcgtaaaagtgcatgaaaaagaaaaatttgacgtattatctcgtttattagacgttcaagcaccggaactagctattgttttcggtcgtacgaaacgtcgtgtagacgaactatctcgcgcgcttgatatgcgtggttacgtggctgaaggtatccacggtgacttgacgcaagcaaaacgtatgagtgtactacgcaaatttaaagaaggaaaaattgatgttctagttgctacagacgtagcagctcgtggacttgatatttccggcgtaacacatgtatataactatgatattccacaagatccagaaagctatgttcaccgtatcggtcgtactggtcgtgctggtaaagaaggtatggcgattactttcgtacaacctcgtgaaatgggttatttacgtattgtggaagaaactacgaaaaaacgtatgcaaccacttcaagctcctacttgggacgaagcatttgcaggccaattacgcgtagcaactgaaaaaattcaagaagcaatcacagaagaaaacttagctgactacaaaacgtttgctaacgaacttcttgaaaaatacgatgcaactgacatcgcagcagcaatgcttaaaatgttagcgaaagagccagacaaaactcctgtccatattactgaagagcgtccattaccatcccgtggtggcggtggctacaaaggtaaaaatggtaaaggcggcaaaggtggcggctatcgcggcggaagcggcaaaggcggaagctaccgcgatcgtaacaacagcggcaaaggtcgtcgtagcggcggcggaagcggttctggcggtggtggcaatcgtgatcgtcgtagtggcggcggagaacaacgcagcggcggcaacaaaggcaactactcacaaaaatctaaataagattattagacaaatagttaccatatagatagactgtagataaagaagtttttaactttatctacagtctatttttttataaatactaatgttaaggatacgggagtgtggcgctcgtcatgaagataaacaaaattatcgaatatattgtagtagcaatcatcgttttaggttggacttacttcattgttattaaagaaattctccctaaaaatataggatttatttcattagtaattttatcaataattctttatttagtaggcaaaaggttgaatgggaaacatagcagataaaaaaacggctatactctaagtagccgttttttatgtgcaataattcatttacattaacttccaaatatgagaaaatagcatgttggcaaaattgccacacgtggttcattcataccatcccacgtaaa

SEQ ID NO: 1920 - DNA, 1513 bp, Listeria monocytogenes-4B
  misc-feature (1)..(end): n can be any nucleotide a,g,c or t/u
cgaagtagattctcttcgtttctttgatgtggaaacgcagcgctcgacaacccgcgtggaagaattccgcctactgcctgcaactgaaatcattttagatcaaagctattatccggatatcgtcaaacgcttagaaaagaaaatgacacatactttaaatgaattgaaagaaaacgaggataaacaagcgctcgttgaaaatttagaagaagatcttgaaatgcttcgttctggcgtgaaaccagacatgttctttaaatatatcggtctggcttatcctgacccagcctcgctttttgattattttccaaaaaacacggcaattttgcttgatgaatttgggcggattttagaaacggaagaaagcttggagcgggaagaagcggagtggcaaacagaaacattaagtcgaatggaaacggttcgcgacgtgcaagtaagtcattctttcaaaaagctattagaagcaaatcactcgccgaaaatatacttatcccttttccaaaaacaaatggcgagcatgcgcgtctcgaaaacaactaacatcgtctataaacaaatgcagcaatttcatggccaaatgaatgtgttgaaaaccgagctagaaagttggcataagaataattatgccgttgttattttagccccaaaccttgagcgcgccgaaaaaatgcaacaaactttaactgactacgatatggaaagtacgattttgaaaaaagaatcggatgtgccgaaatatggaatggttcagtttgtcatcggaacgttccagaatggttttgaacttccattagctaaagtagcgattataagtgaaaccgaactgttcaataaaaaaatcaaaaaagtgaagaagcgccaaaagctctcgaatgcagaacgaatccaaagttactctgaattaaaagtaggtgactacgtggttcatgtgaaccatggtatcgctcgttatgttggcatggaaacgctagatatcaacggtgtgcataaagattacttgctacttgtttaccaaggagaggataaactatttatccccgtcgatcaacttgatttagttcaaaaatatgttggtgcagaaggtaaatcaccaagattaaacaaacttggtggcgctgaatggaagcgagtgaagaagaaagtacaagcttccgtccaagatattgcagacgatttaatcaaactatatgccgaacgtgaagctgaaaaaggctatgcgtttattgcgggtgatgaaatgcaaagcgaatattgaaggttcgataagaccaacactgctgttaaaaaaatgccgcaagctgtatcaccatcatcnnnnnnnnnnnccccnnnnnnnnnnnnnnnnnnnnnnnnnnnnnnnnnnnnnncnnnnnnnnnnnnnnncnnnnnnnnnnnnnnnnnnncnnnnnnnnnnnnnnnnnnnnnnnnnnnnnnnnnnnnnnnnnnnnnnnnnnnnnnnnnnnnnnnnnacnnnnnnnnnnnnnnnnnnnnnnnnnccnncnnnnnncca

SEQ ID NO: 1921 - DNA, 841 bp, Listeria monocytogenes-4B
acagtttaggtgtgctctgttgcggaacagggattggaatgtctatggcagccaacaaaataaaaggtgttcgtgctgctgttgtttcagatgctttttcagcaatgatgacgaggcgacataataatagtaatgttctttgtcttggtgaacgtgttctgggcgatagtctggcgttactcttacttgatacgtggcttgcggcagaatttgaaggtggaagacataatacaaggctcgcgaaattggcggagcttgaggaaccggaggaagataaatgaaaatgattgcggcttccattatgtgtgcagactcgcttcatctcgctgacgaacttcgcgcactcgaacaagcaaatgtaaaaatgctccattgtgatgtgatggatggtgtttttgtggaaaatgcagcaatgggcgcctatgtccttcaagatataaaaaacaatacagatatgctactagatatccacttagctacagtgaaccctgataaatttgtggatttgtatgcggcgataaagccggcttatatgtctttccacgtagaagcttcacctgatgtcgatgcgactataaagcatattcgtgcgctaggaatcaaaccgtccatcgccatcagcccggatacagagattgaacagatttatccatttttagataaagtagatatggttttaatgatgaccgttaacccaggattcgccggacaaaaatttcagcatcatgtcctagaaaaaatcaagaaacttcaaagagagcttgaaagtcacaccaataaaccattaattgaagtagacggtaatatttttgaagaaacagttcggttgcttgaaccaatt

SEQ ID NO: 1922 - DNA, 1755 bp, Listeria monocytogenes-4B
  misc-feature (1)..(end): n can be any nucleotide a,g,c or t/u
aaagatggggttattgctgactttgatattgtgcaagaaatgttgcgtttcttcatacaaaagttaaatttaaaaacttttttttcacggccacgtattttaatttgttgtccaacaaatataacttctgtcgagcaaaaagcaattcgcgaagttgctgaaaaaagtggtggaaaacaagtgttcttagaagaagaacctaaagttgctgctattggagcgggtatggagatttttgagccttccggtaatatgattattgatattggtggaggtactgcggatgttgctgtattgtctatgggtgatattgtaactagtcaatcagtaaaagtcgctggaaacaaatgggacgcagatattttaaattatgttaaacgtaaatataacttacttattggtgaaagaacggctgaaaatattaaagtaacaatcggtactgcatgtcaaggagccaaagaagagaaaatggaaatttgtggtagagatttagtgagtggcttaccgaaaacaatttctattacaagttctgaagtggaggaagcgattcacgattcattacacctaatggtcctagctgctaaacaagtgttggaacaaacacctccagagctttcagcggatattattgatagaggaatcatcatgactggtggtggatctttattacatggtttagatgaattaatgtccgaacagctaaaggtcccagttttaattactgagaatcctttagatgtagtggcacttggtaccggcattttacttgactcacttacaaataaaaagcgtaatagattctaaatgtgaattttgggggatgtatatgttagatattaagaaaatcaaagagattttgcctcatcgttatccatttttgttagtagatagagttatttctgttgaagaaggcaaaaaagttaccgctattaagaatgtaacagcaaatgaagaattttttaacgggcactttcctgagtatcctgtaatgccaggagttttaatagtggaagctctagcgcaaactagtggaattgcaatgatgcagagtgaagcaaataaaggtaaaattggtttatttgctggaattgatggttgccgatttaaacgtcaagttgttccgggggaccaactcttgcttgaggctgaaataactcggatgaggggcgcgattgcaaaagcaaaagtcaaagcaactgtagaaggcgatttggtttgtgaagctgaaattatgtttgccttatcagacctacctaaataaaaagattagcactgaggtccaaatgggttttagtgcttttttcatgttctcagaataacattggttaaaaattttttcaaagtactaaaatgatgctttggatgtcattaactacataaaatgatgtttttcttttagaggaaataatcttttggaaggtttctacctagtgaaaatacagttttagctattttacaataaactttttatctaatacaatcgctttacatcaaaagaaagaggcgattatatgattaatcaagtaactttagtaggcagattaactaaggaaccagaattgaaatggaccgcggaagacagggctgttttgaatttaaccttggctttaaatcggtttggtnaaaataaaagagctgataatgatgctgactttattcaatgtgttattcggggtaaaagagcagaggccactgcagagttctgtgcttcaggacaattagtaggagtagagtgaaaactacaatataaaaatt

SEQ ID NO: 1923 - DNA, 1823 bp, Listeria monocytogenes-4B
cgcgtctggaaagaagaaaacatctagcacagcttgcaaaaggcacagcatgcaaacttgcagagggaagatatatcattgaaggacaatgccgaccgaaaaaacaaacaaggtctcaataagaaactacctaaaaacgtactggtgtccatagacgaaaataaaaaagtgacgggaatgggcgataaacccctggaagaatcaggcggggatgacgctcacattgaaatggagaacaatcactatcactctgactagaaaaaagaaacgtaggccagccgaacagctaaagaaacagatagtgatatccgctccataaaaggggagatagatgataaggccgaaaaaagaagtctgacaacagctaaagaaacagcgcatgaaacaacacacgattcaactcaaaaagaaccagaaaaacagtcgaatgatacttctggacaaaaaacaacgcaaaataatgagacgtctgaaggtaaagataatcaaacacaaggcgcgtctggcaacaatgcaaatggaaatgcaaataacaatacagcgagaagtaatggaacaggcggaagtgattctggtgcaaacggctctcagcccggtggtacgcagaataaaccaaatgaaggcgatgttaataaagcgaatgaaattattaaaaagctaaacgaagctgaaaacacaaatacgtttcaagtaccaattgtggatgtcaatttgacagttaaaggtcaagtggctacagctaaactaaaactgacagacgcatccaaaaggctaaactccttagaagcaattctttacgatagtaagaacaatattgtaaaaaaagaaaaattgaactcaacaaaagcgaatcaaaacttcacctttaacaatttaaaatatggcgaaacatatcaagtagttgttcagggaagctacaagtcagcaagcaataaaaatcaagatactattttcttccgccaaacggttgaggcaaaaccggttgttttaactccaaaagtgacggagcgcggcgaagattatatgaaagcggaactgactgcaaccgaactttacggtcatattgataagctggttttaaaaatcaaagaaaacaacagcaatgtaaccacttctcaaaaagttactgttgatgcgagtcaattgacaaaagacggtcaagtagaagttaaatttaattcattaagtagtgctaaagaatacattatcgaaatggaagaattgattgttgatggaaaaaacgtgacagatgatagttggtactttatttcctctacattaaaagcgaaaccaacaattgaaggcataaatctttcatacagcacggataaaggcgaatttgttgcgtcaccagttaatctaattgacagagacgaatcaattacaagcattcgatatgtagcgtatttagaagatgactataaagcaaatggttctaatgccaaggaatacgcttattctgtagtagatgccaaccaaaagaaaaccgctgttaaagttggtcgaacagttgatatgaatgatggtagttatatttttgttggttatatttctggcaataatggtcagtctgattatacttttgcaactccagcatagaacagtgtcatcgttggtaaaaaaacgaagccaactgtagagttttctctgaaagaagcagagcaagataaactgacaatcaactatgaaatttttgatgcagataacacacttctttttgataatctaacacatccagccttaaagctttataagtcagacgctcaagggatgtatttccagcacatggtggccgtcgagcatgctgctaaagttactacagc

SEQ ID NO: 1924 - DNA, 1290 bp, Listeria monocytogenes-4B
tgactgaatgtatcacttgggcggacggacgaagcagtgagacgcttgaaaaagtaaaaagggataattacttattccaactgtatgaggccacaggaacgccgatacaccctatgagcccctttgccaaaatttgctggttgaaggaggaaaagcctactttatttaaacgcacagaaaaatttgttgatattaaatcctatattttataccgattatttggtgtttgggtgatggatgaatcgttagcatcggggactggactatataacattatggagcacgactgggaatttgaagcaatggaaattgtcaaattgactcctgatctcttgccaaaagttgtaccagaaacatatcaattaactggtgtgaaaaaagaatacgctgaattaatgggaatcccagaaaatttaccattcattgtaggaggtagtgacggggcgctagctaatattggtattcaagcgaccggccaaaatgatgttacgattacagtaggcacaagtggtgcagttcgcaaacttaccaatcaattccaaatagattctcgtggtcggacattttgttatggagctggtgatggatactttatcgcaggtggcgcagtgaacaatggtggaaaagtagtcgaatggggtctgcaacaatttggttctgaagaggaaattaaggggcgagacttcgcaagctttattgcaaaaatggaggaagttcctccaggggctacgggtcttttattccagccatatttactaggtgagcgcgcaccattttggactaatgatattcgcggaggttttgttgggctgacgattaatcatacaaaagcccattttattcgagcgattttggaaggtgttgctttcaatcttgcagaagtttatgaggcagtttcggctccagatgacattatttacgtcacaggtgggatttctgcgcatgatggttggtgtagacttctagcggatattttgaaccgtgagatacgtgttccgcatacgatagaaggctcgagtttaggagcagcaattattggtatgcgctcactcggaattttgaaagatttgaatctaaaacatacgctgcctattaaagcggtatatcatccaagtgagaacgtccttaaatacgcggaattacgtctgatttttaaacaagtaagcacacagttaatgtcgagctacagccaattaaatagttggcaaaagaagtttgatattaacagctaaattttggatttcatgatataatcactaaaagaaaagtgataacgagggggagaaacca

SEQ ID NO: 1925 - DNA, 1503 bp, Listeria monocytogenes-4B
  misc-feature (1)..(end): n can be any nucleotide a,g,c or t/u
acgccactgaaatcaatgaaggcaaactacctgtaactgaccttggtgtcgttgctactgacccaacaacgcttgaaatcacactaaaaaaaccagttccctacttcatttcacttctttcttttgaaacatttttcccacaaaaagaaagctttgtgaaaaaacaaggcgacaaatacgggacagatagtgcgcacactttgtacaatggtccttttgttatgaaggattggggcggcaacattacgaataaatggacttacgcgaaaaacgaccaatattgggacaaagataatgtcaaagtaaatgaaattgatgtgcaagtcgcgaaagatattaacgccggcgtgaacctttataatacaaacgaagctgaccgcgtgccactttcaggcgattttgcgaaacaatacaaagacaagaaagatttccaaacggaaaaagatgcgctgattagttatttgcgcatgaatcaaaaacgcgacggtaaagcgactccacttgcgaataattccttgcgtcacgcgcttaatttagctgtcgataagaaacaactaacggatcggattctcggtgacggttccttcccagcgaacggacttcttccaaaagatttcgtccaaaacccaacaacgggcgctgatttccgcacagatagcggcgaccatttagtttataacaaagaagaagctttaaaatattggaaacaagcacaaaaagaacttggcactgacaaagtaacaattgaacttctcggcgatgaccaagaaacaacgaaaaccattttcgcttatttgaaagcacagtttgaagataatttgccaggtgtgacgattaaagtgaaaaatatgccttcgaagagcgcgacacagctaacttctgatggtaattatgacttgtcactggctgcttggatgcctgactttaaagatccctggacgtatagcagtttattcttatccgattactttaataaccatatgagttacaacagtcctgcttatgataaacttgtaaaatcgactgatacaacacttgcgacgaaaccagaagaacgttggaatgcattcgtagcttctgagaaagttctgcttgatgacgacgcggcgatcttaccactttatcaacatcaaacagcagtgttgcaacgtacggatattaccggcgtgcagaaacatgcttttggttcgccttatagttataagtttattcgggtggagaagtaattcgccagtttggaaaaagccagcaattttaaaaattgctggctttttgatttataaattattaaattctatctttgcaagtaagcgtttatcttatttactaacgacaccaatcagataaatgaacttaatttatatattaaaaagtatcgcaaatataacaataggctggaacatataggattctgaaaagcctcaagtgttccaacctattatttaatcattaatatttaacggaanttgttctttcttattctcggataagacgtggcatgaa

SEQ ID NO: 1926 - DNA, 1465 bp, Listeria monocytogenes-4B
  misc-feature (1)..(end): n can be any nucleotide a,g,c or t/u
taaccaattgtggcccagtcgctattcctcatgagaaaaacaacccataaatagccatattccggccacgtttacttggatcactcatcgccccaatccaagtctgcgaagaaaaatgtaacatatgatcccccacaccaataagcaaccttaatattatccaaaaatattatttaaaccagatttgaaaagccaaaatcgaaaccgcaacttttcctcccccaactaaaataatcggcttataaccatatttatgaagtggggcctcaataaatggagaaataagtaaaactcctaaatagattcccgtagcatgaaacccattaattcctgcacttatacctttctcttctaatattatcgcaataagaggtaataaaaccccctgtgacaatcctgaaatggcaacaaccatcgtcaaaatccaaaactttcctttagcccccattagatacctccaacaaaattttactaaataaaaaaacaatgtcacaaactgacattgtttttaggatgacccgtacgggattcgaacccgtgttaccgccgtgaaagggcggtgtcttaaccgcttgaccaacgggccatatctggcggagaaggagggatttgaaccctcgcgccgcgcgagcgacctacacccttagcaggggcgcctcttcagccacttgagtacttccccagatataaaaaacttattcttattgaaagaataactccacaggcaggactcgaacctgcgaccgatcggttaacagccgattgctctaccaactgagctactgtggaataaaatgggcctaaatggactcgaaccatcgacctcacgcttatcaggcgtgcgctctaaccagctgagctataggccccagtaaaactatattcatggtaaaaagcgggtgatgggaatcgaacccacgacaacagcttggaaggctgtagttttaccactaaactacacccgcataatataatttttaaaaacaaagggcggataatgggaatcgaacccacgaatgcctgaaccacaatcaggtgcgttaaccacttcgccatatccgccataaggcaaaaatgtttaaaaaaagaatggcttgggacagaatcgaactgccgacaccttgagcttcaatcaagtgctctaccaactgagctaccaagccataatggcggtcccgacgggatttgaacccgcgatctcctgcgtgacaggcaggcatgttaacccctacaccacggaaccactattgcgggggcaggatttgaacctacgaccttcgggttatgagcccgacgagctaccagactgctccaccccgcgacaataatattaaattttagtccacatatcacaagtgaaaaacggaggaagagggattcgaacccccgcgcggtattacccgcctgtcctttccagcacaggtcggccgtnagaggcatgcatgtagttggtcaccaagtaagt

SEQ ID NO: 1927 - DNA, 1352 bp, Listeria monocytogenes-4B
  misc-feature (1)..(end): n can be any nucleotide a,g,c or t/u
tttacttcatatcaaagaaacaaaacatgttgttcaagggaaaaacgcagtcgaattacaagtaaactaatagtgaggtgaaaatgatgaatcaagaagcactagaaaatatggttagaaatattttacaagaagtaaatagtggcgcagtctccacaacaacttcccaaaaagtgagcggagatacactgacagtacgagattatccactcggaacaaaacgtccagaacttgtaaaaacatcgacatcaaaatcattagacgacattacgttgaaaagtgttctagatggcacgatcaaaccggaagatgttcgtgtaacagcggaaacgcttaaaatgcaagcacaagtagcaagagatgccggacgtgcaacactcgcgaataatttcgaacgtgcagcagagctaacgatcgttccagatgaacgcattttagaaatttataatgcaatgcgtccgtatcgttcctcaagagaagaattacttgcaattgcggatgaattagagagtgtttatcatgcaactatctgttctaattatgttcgtgaagcagcacagctttatcaagagcgtaagaaattaaaaggcgataattaaaattctccttttgctcgcgattatgtaggaaatgcggtgaaatgaatgaagtatattgcagggattgatatcgggaattctacaacggaagtggcacttgcgatggcaaactattcgaaggaagtagcgtttgttgctagtgctattacggacacaaccggtatcaaaggaacaaaacaaaatcttcacgggatttttaaagcgttgcgacttgctttagagaaagtaaatgcgacaaccgagaacttagccgaaatccgtatcaatgaagcgacaccagtgattggcgatgtggcaatggaaactattacagaaacaatcattactgagtctacaatgattggtcacaatcctaaaacaccagggggacttggtatgggttcaggtgtgacggtgctgttggatgacgttacatctaaatcaaaagatgaggactacattgtgattatcccgaaaacagtcgattttgaagatgcagcaaagcaaattaatacttacgtcgaaaatggctatcaaatcacagctgcaattcttcaagcagatgatggggttctcgtgcataaccgactaaaccataagattccgattgtcgatgaagttggttttattgataaagtgccggtcgatatgttagcagctgtcgaagttgcagctcccggaaaagtcattgaaaccatttctaacccatatggtattgcgacagtctttccagcacagttcggccgctcagtcatgcggctagttgcccncagt

SEQ ID NO: 1928 - DNA, 2569 bp, Listeria monocytogenes-4B
ggaatgggaggaaatgaaacacccaaacattcgttcaaaagcaacatactggcaagaaaactggcaaacgatagcaggacaaattcatacatttaccaaagaaaaagaattcaacgatgcgattaaaatgacgcacacaggtggacatagtaatgggcattcagttgtatggatagaatcggacggagaaaaagcgatacatatggcggatattttcccgacatttgcgcatcaaaatgtgctttgggtcactgcttatgatgattatccaatgacttctatctctgccaaacaagaaatttttaaacaaacttttggtgaaaattattggtttttatcataccatgacgccagatttcgagcagttcaaatggacggaaatggaaaaatagaagccgaattaaaaatagaacagcgaaattaagaagtgagaagtcacttcttttttttgagggtatttttattttgtgttataattgtatttataaacgctttaaaatagccaatatgatatcctgggtagggggttgtcgtgtggtatactataagggggtatatatggaaatcgagcaaaagaaagcgctggtaacgcgattcgctaagatagaaggacatgtacgttctataaaaacgatgacagaagaagagcgtgatttagaaactattatgcaacaaatagcagcggtgaaaaaagcgatggatgctgccgcaaaattaatctacactttaacaaatgaaggagttaattgaacaaggtgaaacagatgaagtggtaattaaaaagaaaatagatagttttatccgctaaaaaacgactccccacttggggaatcgtttttattttttaagctaaatatacgtcgatgattgttcctgtgttagcgtctgcgataaattcgaattgcttcttctcgccttcgcgaatacaagtgattccgccgtggtaaacgaaagtatcaatcgcgaattttttgtaatgttgttttttaagttgaatccaagaaccttcgattggtccttcttgcttgaatgcatcttttaccttttctaagatgacgtccccagaaattgttttatcgctaagtaaataatgataaacaaggtgtccagccgctgctcctgctccaacgcctgcaatgaaagctttccagttcatcgcttttcctccctagtgtttcctattctttttaaaagatgctactacaaacatctcttttaatcattatactacaaatttttgattataaaaggatttttgaacacgctttctgtaaaagagagaagtgaagcgagcggaaacggatattatttgctataataaaagagattttagacggaaagagatgattattaatggaaaaagaaacgttagcgatgtttaaagaattaacggaacttcaagggacttcgggtgatgaacatagaattcgtgcttttatgcgaaaagaacttgaaccggtttccgatgaaattatccaagacggcttaggtggtatttttggtgtgcgccacggagcggaaggtggtccacgcgtcctcgttgcggctcatatggatgaagttggctttatggtaacgcaaattacagaaaatggtctaatacgtttgcgaggattggtggttggaatccgcaagttttacaggcacagcgagtgcaaattatggcgcctaacggtccggttattggggtagttgcttctgttccaccgcatttgttgtcggaggctgaacgtagcaaaccaacggatcctaaaaacttactaattgatattggtgcggatgataaagcggacgcggagaaaattggtatcaaaccagggcaattcattgttcctgtggctgaattcacgccgcttgcgaatccaaagaaaattttagcgaaagcatgggataatcgttatggcgttggtcttgcgattgaacttatgaaagaattgaaaggcgaatcgttgccaaatacactttttgctggggcgaatgtgcaagaagaagtcggtctgcgcggtgcgggcgtaagtgcgaacatgattaaaccagatttattcttcgcgttagatgctagccctgcaaatgatacgactgggaataaatcgcaattcggtcaaattggtcaaggtttcttactgcgtattattgaccggacgatgattatgcatcgaggtatgcgtgaatttttattagacactgcggaagccaataaaattccttatcaatattttgtttcgccaggaggaacggatgctgggaaagtgcatacatcgcttagcgggattccgagtgcagtaattggtgttccagctagatacattcactcgtctaactcgattttacatgtggatgactatgctgctgcaaaagaaatgattacaacgcttattcgcagtttggataaaacgacaaaagaaacaattaaaaacaatgcgtgaaataataaagaaaccagtaattgttgtggggttgttccttttggtggcgagtttagtattcttgctaggctatgttacggacctgccttattttcgtgattcagagcttggttggatatggaccactatgatagtgggatcgt

SEQ ID NO: 1929 - DNA, 1640 bp, Listeria monocytogenes-4B
cgacagtgtcctcggaaagcaaccaattaggtgctcctttttctttatttagcttcatggtatagtttttctaattcttcttctgaaaaatcgtaagcgttacgacaaaaatgacattctgcttctgcgccgtgatcctcttctatcatggaacgaatttcttcttttccaagtgaaattattgcactgccaaatttctctttggagcagttacattcaaaggaaacggggattttttctaagatttgtagtttatcttcgccgcctgcaagtttagctaaaatcgattcaggagtttcgcccgcttcaatcattctagaaactgttggtagagccgtcagatttttttcaatttcatcaatgatttcatctgtcgcaccagggagtaattgcaacatgaaaccgccagctgcttcgattgtatcatctgggttaacaagtactcctacaccaacggaggaattgatttgttcagatgttgctaggtaatacgtaaaatcttcaccaatttcacctgaaataattggcgtttgtccggtgaaattttctccaaagcctaaatcttttacaactgaaagcattccggatgttccaacgccgcggcggacgtcaagttttccagcttcatttagttcgctgaagtgaacgtgtggatttgttacgtatcctctgatttgaccttgtgcgttactatcagctacgattggaccgattgggccgtcgccttcgatttttacagttattttttggtcttctttttgcattgctccaaggaaaagtgttcctgtcatcgttctaccaagtgcggcggatgagacggaccatgtatcatgtcttctttgtgcttctttgattgtttcggttgttactgctgcatatacacgcgccatgccatcgtaggctaacgctttaactaaataatcactcattatataaaactccttttatttttctgtagttggtttgtttcttctatatagaagttctagaccttttaatgttaaaaatggatctaaaatatctactgcagaagatttttctgttatcatccgagcgagcccgcctgttgcaactactactgggcttgcgttggattgttttttgatttctgcgataatcccttcgcattggccgacgaaaccataaaagatgcccgcttgcatggatgccacggtggatttgccgatgatttggtttgattcagcaatatctacgcgtggtagtttagcagcgcggttgtatagagcttcggtcgaaatcataatccctggagcgatggcgccaccttggtatacgcctgattcatcgatatagcaaaatgtggtcgcagtgccaaaatcgactacgataaccggtgtcccgtattcttctgatgctgctacggcgtttacgattcggtcagatccgatttcgcaaaggattatcgactttgaggtttaagccggtttttattcctggaccaacgattaatggtcggatattaaaatagcgtacgcacattgtttccattgcgtgcataatcggtggaacgacggacgaaataataattccttgaatatcagaaggagttaaattcgcataagaaaaaaagtttttccagcacactgttgcccatccagcagctgctaagtgcttcaggg

SEQ ID NO: 1930 - DNA, 2040 bp, Listeria monocytogenes-4B
aataaaatccagttcagatatgatttcttttttcgaagaaccgtattattttactattcctaaaagcaatctttcagaagaagaagcgatgttattacatacgctatttccagaaccattaccaacatttcctaaagaatccacccaattttggttcgatttattgtttggaaacaaggaattggcgatgacaaatgagaaagaaacatatcgcattacgcagttccatattaagacaactacaactaaaaacatgttacaagagtggcaaaaggctttgctgagttttttcagtccagaagctgagttaattatgttttcgactaactatggcgttattattgaaaaatcaacggggtcgctgcttggcgaagaggaactaatcgccgttgccggtacgcttgaaaatgatttctatatacaatctacatttttcatgggtcttttccatccgttaaatgatcgattgcgtggtttatttgcagaagaacgtgccattttcaaccataataatcgtgaggtagttcagaccgtggcttccgaaagtttaaaagttatcgcgcttcgaatgaaggaaagtttaatcacgaatgaactcaacgaccttttccatcaagatgatacttggattccgctgattcacacattatttaaaaaccaaggaaacatcagtctcacggctaaagagctttttatgcaccgaaataccattcaatatcgtttggataaattttatgagcaaacaaacttatcgctccgcaagatggatgggttgctcttagcttatctatctacacttcaaacaaataatagcaatcatgaataaatgatcatggttgctttttcgcttgacttaaagtccacttcaaggaatacaatcattatagaaaatcagtaaaggagaatagtcatgaccaaaaataatattagtttttatgtagtagatgcttcggaagaattaaccatgaatatcaaagaagctagtgaaaaaagtggcgtttctgccgatacaattcgctactatgaacgcattggtttaattccacccatccaccgtaatgaaagtggggttcgtaaatttggcgcagaagacctacgatggattttatttactcgccaaatgcgccgagctggtttgtctattgaagccttaattgattacttggcacttttcagagaaggcgaacacacgctggaagctcgcgccgaattgctgaaaaagcaacgcatagagctgaaaaatcgcattgatgttatgcaagaagcgctcgatcgacttgacttcaaaatagacaattacgatacccacctcattccggctcaagaagaactaaaagattttaatgttgaaaggagtaattcataatgagtacacttgaaaacagcgttatttttgataaaggtgaactgattactaatgactactttaccggtaatgcttatttaaaaatgcttgtcccagaagatactgtttacaattgcccgattgggaacgttacgtttgaaccgggagctagaaacaactggcataaacatgacggcggacaaatcctacttgtgacaggcggaactggctactatcaagaagaaggaaaacctgcccagttgctcagagagggcgacgtggtaacaatccctaaagacgtgaaacattggcacggcgctacgaaagatagctggtttgtccacttagccatttcgacaaacgtggaattaggcggaacgacctggttagaacctgtttccaacgagcattacaataatttataacaaaaaacccgctagccttcattcaaggttggcgggttttacttatttacttacataagctaaaatatcttctggtttttcgaagacaagttctgctttttcaaagccatctgttgtcttcgcgccccaaagtgctaagccaaaatgagctccggccgcatgggcacatttcatatcgtacgaagaatcaccaacataaagcacttcatgtggctctcttccaagaatttctaaccctttcagcagtggatctgggtgaggtttatggtt

SEQ ID NO: 1931 - DNA, 1455 bp, Listeria monocytogenes-4B
  misc-feature (1)..(end): n can be any nucleotide a,g,c or t/u
gttcgacccggtgaaactagttattacccttgcggcaacagactcagaaagccatttagaagtgttgtcagagcttgcagaagtgctcatggacgaggaaaaggtaacccgtttgatcgaagcaaattcaagccaagcgttttacgatgagttaacaaaagaaggataataatttcactaaagaggtgaagaaatggaaaattatctttgtgtcgacattggtggaacgagtatcaaatatgctaaatttaatcaagaaggtaagcgggtgggcgatcttaagtcttgtgtgacgcctataactggcggagcgaatcaaatcatgcccgcgcttattcggattgtcgaacaagaaaaaacgaatgtagcgggcgtctgtgtggcctctgcgggtgttgtggattctgtgaaaggcaaaattatttatgctggctacacgattcctaaatacactggaactgaaataaaagcagaactagagcaccgatttcatcttccgtgcgcagtggaaaatgacgtaaatgcagcctgccttggcgagttttggttgggtggagcacgggggcgtgggagcgtgctctgtttgacaattggaaccggaatcggcggagcaatgttactaaacgacaaactaataaatggatcgtcttttacagcatgtgaagtgggctatatgcacctttcacaagggagatttcaagatgttgcttcaacaaaagcattgattaaacaagtagcctcgcgaaaaaatatcgaggaaaatgcgttaaatggtcgtcaagtcatggaatgggcctatagcggagatgcagatgtgctggctgaaatagagcaatggattgagaatttagtcgaaggtgtagtaaacttaaggggtgttttcaacccanaagtgattgtactcggtggcggattaatggaagaagagtcattcttcaaaccgcgtctaaaagcggctatctcaaccaaattaatctcaccgatgttcgatacagcagatattactttcgcaaagctgggaaatgaagcagggatgattggtgcgctttatcatttcttaaaccagaaagaggccgaaaaagatgacgattttaaatgaaatccaacaaaattacaatcgattaccgaataaagaaaaacaaattgcgaagtatattttagaaaaaagtgatgaactcaagaatattaatattaaagagctagctgaagaaactggcacatccatttcgacgataacgagattttgtcgccatgtacgctgtgatagttttgtggatttgaaaatgcgggtgaatactgcagcgacaatggttccgtcagttggttatgatgacctttttccacacgtttattcgttctaaaataaagtaattgaaacacgtttccagcacagtgcggcgctcaggcaggtctggtggctttagccctcncaaaggaaaacaccnnncaaccttc

SEQ ID NO: 1932 - DNA, 1709 bp, Listeria monocytogenes-4B
caccagtgatctacaaagtaaatgtatccattccaaacacggtgaaaaatgtgacgggcgctttgattgcaccagctactattagcgatggtggtagttatgcagaacctgatataacatggaatttacctagttataccaatgaagtaagttatacctttaaccaatctgtcaccattggaaaaggaacgacaacatttagtggaactgtgacgcagccacttaaggcaatttttaatgctaagtttcatgtggacggcaaagaaacaaccaaagaagtggaagctgggaatttattgactgaaccagctaagcctgtaaaagaaggttatacatttgttgggtggtttgatgcccaaaccggcggaactaaatggaatttcagtacggataaaatgccgacaaatgacatcgatttatatgcgcaatttagtattaacagctacacagcaacgtttgataatgacggtgtaacaacatctcaaacagtagattatcaaggcttgctacaagaacctacggcaccaacaaaagaaggttatactttcaaaggctggtatgacgcaaaaactggtggtgacaagtgggattttgcaactagtaagatgcctgctaaaaacatcaccttatatgctcaatatagcgccaatagctatacagcaacctttgatgttgatggaaaaacaacgactcaagcagtagactatcaaggacttctaaaagaaccaaaaacgccaacaaaagccggatatactttcaaaggttggtatgacgaaaaaacagatggtaaaaaatgggattttgcgacagataaaatgccagcaaatgatattacgctgtacgctcaattcacgaaaaatcctgtggcaccaccaacaactggagggaacactccgccgactacaaataacggagggaacactacaccaccttccgcaaatatacctggaagcaacacatctaacacatcaactgggaattcagctagcacaacaagtacaatgaacgcttatgacccttataattcaaaagaagcttcactccctacaactggtgatagctataatgcgctctacctgttgataggattgttagcagtaggaactgcagtggctcttactaaaaaagcacgtgctagtaaatagaagtagtgtaaagagctagatgtggttttcggactatatctagcttttttattttttaataactagaatcaaggagaggatagtgtgaaagaaaagcacaacccaagaaggaaatattgtttaatctcaggtttagctattatttttagtttatggataattattggaaacggagcgaaagtacaagcggagactatcaccgtgtcaacgccaatcaagcaaatttttccagatgatgcttttgcagaaacaatcaaagacaatttaaagaaaaaaagtgtgacggatctagtgacacaaaatgaattaaatagtatagatcaaatcattgcgaataatagtgatattaaatccgttcaaggaattcagtatttacccaatgtgacaaagttatttttaaacggcaatcacctaacagatatgaagcccttaccgcacttgaacaatttacgatggctttttttacaccacgctccggttccggacctccgctccatcacggacttcgccggtgcccctccctttctttggccgctcgtggcctccccgctctcctcggcctcg

SEQ ID NO: 1933 - DNA, 1605 bp, Listeria monocytogenes-4B
ggaattctaagtttatagagagagtcgccatggctggaagcgacttagctgaacactcctgaaatgcctccctgaattctgatgggaaatttagtatcgtcagacgaaatgtgggtcgttacccccacccctagagttggagtatttgctaaaattggcaatactcaagtcagagtggaaccgcgcaaagcgtctctgtatcggaggggctttttttgttggcgtaggttccaataaaaaatgtacgaacttgaataaggaggcaacaaaatgccaactcgcttaaaagaagatattgcaacaattataaagaatgaccctgcgacgaaaagcttttttgatgcttttttaacgaatccgggattgcacgcactttggtggcatcgtgtggcgaactttttttatcgtcataaaatggttttgtttggaaaagtattatcgcagaacgctcgtttctggactaatatagagattcatccaggcgcaactattggtagaaggctttttattgatcatggtgcaggaattgttattggtgaaacagcagaaattggggatgatgtaacgatattccacggagttacgctaggtggaactggaaaagattgcgggaaacgccatccaactgtcggtgacggggcgcttgtttcggcaggagcgaaagtacttgggccggtggaaattggagcaggagcgcgtattggagcaggagctgtcgttttaaaagatgtacctccaggcgcaacggttgttgggattcctgctaaggttgttcgtttgaatggtcgtacggtaggacatgcggttcctaaaatggatgaactgacattacgaattgcggaattatgtaaaatatagtagaaaaacttttgaaggaaaaggagtagatctgattgtcgatacaaatttttaatacgttaaaacgagagaaagagccttttaaaccactcaaagatggcgaagtgaaaatgtacgtttgcggaccgactgtgtataactacattcatatcgggaatgcgcggccaattattgttttcgatacagttcgacgttattttacgtatcgtggttatgatgtgaaattcgtgtctaattttacggatgtggatgataaattgattcgtgcggcaaatgagctaaagttgacggttcccgaagtggcggatcgttttattggggcttactttgatgatgtagatcaactgaatgtggcgaaagcgactgtgaatccacgtgtaacggagaatatggatgaaattattcaattgatcagtacgctaattgaaaaaggctatgcgtatgagtcggctggtgatgtgtatttccggacgaaaaaattcaaagattacgggaaactatctggccaagaattatcggaattgcagcacggggctcgggttgaatataatgagcgtaagcaagatcaacttgatttcaccctttggaaagcggctaaaccgggtgaaattttctggcaaagtccgtttggtaatgggcgcccgggttggcatattgaatgctcggcgcttgcgaaaaaatatcttggtgacacgattgatattcatgcgggtgggcaagatttagtatttcctcaccatgaggatg

SEQ ID NO: 1934 - DNA, 1570 bp, Listeria monocytogenes-4B
gaggggccgacagtgtgctggaaagaaaaaaaattcggttctccgttaactacaaatgatggggtaacgattgcaaaagaaatcgaattagaagacccatttgaaaatatgggagcaaaacttgtatctgaagttgcttctaaaaccaatgatgttgctggggacggaactacaacagctaccgttttagcgcaagcaatgattcaagaaggcttgaaaaacgtaacagctggagcaaatccagtaggcgttcgccgcggtatcgaaaaagccgtagcaacagctatcgaagaattaaaagctatctctaaaccaattgaaagcaaagagtctatcgctcaagttgctgctatttcttctggtgatgaagaagttggtaaattaatcgcagaagcaatggaacgtgttggtaacgacggcgttatcactattgaagaatccaaaggctttgcaacagaattagatgtagtagaaggtatgcaatttgaccgtggctacactagcccatacatggtaactgattccgacaaaatggaagcagttcttgaaaaaccatatattttaattacagacaaaaaaatcaacaacatccaagaaatcttaccagttttagaacaagttgttcaacaaggtcgtccaatgttaatcattgcggaagatgttgaaggggaagctcaagcaactcttgtactaaacaaacttcgcggaacattcaacgtagtagccgtgaaagctcctggttttggtgatcgtcgtaaagcaatgctagaagatattgctattttaacaggcggacaagtcatcacagaagacctaggcttagaactaaaaacagcaacagttgatcaacttggaacagcgaacaaagtagttgtaacaaaagatgatacaacaatcgtagaaggagcaggcgattccacacaaattagtgctcgcgtaaaccaaatccgtgcgcaaatggaagaaactacttctgaatttgatagagaaaaattacaagaacgtttagcaaaacttgcaggtggggtagctgttgtcaaagtcggcgctgcaactgaaacagagctaaaagaacgtaaattacgtattgaagatgcgcttaactctactcgcgcagctgtagaagaaggtatcgtagctggtggtggtactgctcttgtaagtatttacaataaagtagcagcactagaagcagaaggtgacgtagaaactggtatcaacatcgtgcttcgttccctagaagaaccagttcgccaaatcgcgcataacgctggacttgaaggttcggttatcgttgaacgcttgaaacacgaagcagttggcgttggtttcaacgcagctaatggcgaatgggtaaacatgattgacgctggtattgtggatccaacaaaagtaacacgttccgcacttcaaaacgcatcatctgttgctgcacttctattaactacagaagcagtcgtagcagacaaaccagacgaaaacggcccagcagctgttcctgatatgggaatgggtggcatgggcggcctgatgtaaggttaacatcacctgacatttttgaaagatctat

SEQ ID NO: 1935 - DNA, 2022 bp, Listeria monocytogenes-4B
  misc-feature (1)..(end): n can be any nucleotide a,g,c or t/u
tgctgcatgtctgagcgccgaactgtgctggaaaggaaaataataagttatgcggtgatgtggactttgatgatgtggtagaagaagcaggatttatcacgccggtaccaggtggcgttggcccgatgacaatcacaatgctacttgcgaacacattaaaagcagcaaaacgcatttggaaaatgaattgattaattggatgtgaaatgatggagcaagataaatatttgacggtagcagcaataaccaaatatatcgaaaaaaagtttgaagtagatccctacatgaagcaagtttttgtgcgcggtgaaatttctaatttaaaacaaccagcgagtggacatctatattttacggtaaaagatgaatttgcgatgcttcgttctgtcatgtttcacaaagcagttcaaaaaattggttttgtcccagaagatggtatgaatgtccttatcacaggacgaattggcgtatttacaaaagctggtcgctatcagttctatgcagaacatatggaaccagatggtgtcggagcgctttatattcaattagagcaattaaaatcgcaattggaaaaggaagggctttttgcggaaacgcataaaaaagtgcttccttctttcccgtctaaagtcgctgtcgttacgtccaaaactggtgcagctgttcgtgatatactaaccaccattcatcgaagaatgccttctgtggaagtgattgtttatccaactattgttcaaggggagaaagcggctcaaaaaattgtcgaaaacattggcaagattaatcagcgaaatgatattgatgttatgattattgggcgtggtggtggttcgcttgaagaactatgggcttttaatgaagaacctgttgttcgagcagtatatgattccgatgtacctgtaatttcagcggtcggacatgaaactgattttgcgttaagtgatttttctgcagatgtacgagccgcaacgccaactgcggcggcagaacttgctgttccagattatcgcgatttagaagaacgattagcagaacgtaaataccgtttgctcgcagtcaccagacaagcattagaaagaaaagaacggtcactagagcaacttanacaacacttgattntaaatggtccgaaacatcaattagaacagcaaatgaacgtacagattatttttccgaacgattaaataatgcttttcctaaacaaatatttgttaagcaaacagtttttgaccgattaaatgatcggctacattattaccatccgaataaagaaattgaactacaaaaagaacagatggcactacgacttcaagcattagaaaaagcgatgaaacaacttttgaaagacaaacaacaatctttctttcggcaaatagatgcgctagaacatctgagccctctttctttattgaaacgaggatttggtgtaacgtataaagagaatatgctggttaaatcagtgcaggagcttgaagtcggcgataatatccaagtgaaaatgcaaggcggacagatagaggcactcattaccgcgaaggaggaagatataagtggcaactaaaaagaaaacttttgaagaagcaattgcagaattagaaacaatcgtagaagcactcgaaaatggtagtgcctcacttgaagattctctcgatatgtaccaaaaaggaatcgaactaacaaaattgtgccaagataaattacaatcagcagaaaaacgaatggcaaaagtagtcacagatgcaggagaagaaattccttttgaagcggatggtgaataaatttgcaagatttaaccctttttctagaacaatataaaaaagtgattgatgagtcgctttttaaagaaataagcgagcgaaatatcgaacctagactaaaagagtccatgttatattctgttcaagcaggtggaaaacggattcctcccatgctagtttttgctacacttcaagccttaaaagtaaatccgcttttaggtgtgaaacagcaacggcgttagaatgattatacgtttagccgaaa

SEQ ID NO: 1936 - DNA, 1139 bp, Listeria monocytogenes-4B
gaagaaacggatggaacaattgaatttttatatgcgcaaccaattacgcggtctagtcttgttttttggaaaatgattgggaatttattgtcatttgtggctttttgggtgattacatttgtagcttcagtggcgctagttcttttcttgaagccgagtggggttgacttgaggaaacttattaatggagcttgtacgagtgttttctagtgagttgctagtggctgctgtatttatgagtgctggttttatggtttcatcggtgcttcgttccgctaagcaagcttctccggttgcacttgcgcttgtgttcttaacgtatattttaggaattatggctgggttgaatgataaggtcgatttcttccaatatttttcaccaattaactatgcaattccgtctgagattatggataaagggattacaggaaccaatgcactgatttcttgtggggtaattgttgtgatggttgctatgacatttgttctttataagaaaaaggatttgaaagtataatggatgaaaaacgattaaaaattttagaagtagcaatgggagaatttacggaaaaaggatatcaggcggctagtacgaataaaatttgcgcaaaagctggtgtttccaaagggctgatttttcactattttggttctaaagaaaagctttatattgcggctgttagttatgcggttgattttgcgaccaaggaggttcgtttggaaggggaacattggggagactttgtcgaaatggcgatttggtcaacgaagatgaaactggattttaatcgcaaatatcctgctgtgtttggcttaattatgcaagcttatggaaatccgccagttgcattgaaagataaacttgagggcttttttgataaggcgattgagcgatcagaggcgcaaatgaatcaagttttaagtgaaatgaagttgaaaaaagatgtaaatatggatgcagcgcgtaaagtgatggcggctctttttaaacatattacggagattagtacagtttatttgcagagccatccaaatgcgacgatggaagattttgttccgcttgcgaaggattttacggaaatgatgcgaattgtcgaatttgggatatgcgaagaaaaaaaggatttgggcgagtgagc

SEQ ID NO: 1937 - DNA, 1894 bp, Listeria monocytogenes-4B
  misc-feature (1)..(end): n can be any nucleotide a,g,c or t/u
agaactaatcgccttctcagaaaaattgaaaatcccgattattcattccttaccagcaaaaaccattgttccagataaccatccaaatgcactcggaaaccttggtaaaatcggaaccaaaccagcatatgaagccatgcaagaaactgacttactattaatgttcgggaatgattacccttatagcgattatttaccaaaaaaagccgactgcatccaaatcgatattgacccagccaaaatcagcaaacgtttccccgcaacagttggtttagtaggcgatgccgcagaaatcatcggtaatttaaccgcgaaaaccgcacctgtagaagagcgtaaattccttcaagcatgccaagaaaacatgcaagaatggtggaaatggttagaagaagacatcgcacaaacaaccgatccaatcgccccagaagtcgtgatggcgaacatccaaaaaatcgctgataaagatgccattttctctatcgacgtaggaactgcaactgtttggagcactcgttatttacatttagccccacaaaatgactttatcgtttccgcgtggcttggtactatgggctgcggtttacctggagctatcgctgccaaaaaagcattcccagaccgccaagcaatcgccatcgtcggtgatggaggcttttccatggtcatgcaagatttcgtcactgcagtaggtttaaacatgccaatgattgtcgtcgtgttaaacaaccaacaactttcattcattaaatatgaacaacaatcagctggtgaactaaactacgccatcgatctaccagacatcaattacgcaaaattcgccgaaagttgcggaggaattggtttccgagtagaaaaaatggcggatctagaagctgctttcgaaaatgctaaactagcaactaagccagtaatcatcgacgtttccgtggacagtgcagccgctccactacctggtaaaatcgtgatggacgaagcactcggttatactaaattcgaaatccaatcagtcttagaagaccatcgtttcgcaaaaatgccaccacttaaaaccattttacgcagatttttataaaaaataaataaaaaaataacattatcacccgtttcatgccgattttcgctaattattataacgtttttttattaaaactaattattttacaataaaatatggagtttttttaaaaaatatgagataataaattagaattagagaataggagtgtggaatgggtgaatttaattaaaaatcgtaaattgaaaacaaaattaagcatcaatattgttataacgaccatcatgttaatcggacttggcgcgactagctttcttggctttcgtcatgtagcaacactttcagataatatggttgataataatgtcgcaccgatgaaagaaatcgcaaaaatccaaacaaacatggcgcaaatcaatatcgacatcctgaccatgttcgacactattaacggaaaatcagctcttataaaagatattgatgatctttatgccgaaaatgaccaagcaattcataatttcaaaaaagccaatttaacagcagaagataaaaaacaattagcgtactttgaagaaaaactagcggacatgaaatcatccgcatcctcagtaatcagtgacacatcaagcgcactagacgacgcagaactacttggagcgcaaaacagatactaccaaaacgtcaaaacaaaatttggcgatgcaactaaacaattaaacgttttaaatgaaatgaactacaaagaagtcgaaaattcttctcaagcaatttctgactttggtgtaaaaatcagtgctctatccacgcagttaagatgccgtgtaatttctccttccagcacacgtcggcgtncagcnagctctcagtgcccaacgc

SEQ ID NO: 1938 - DNA, 1518 bp, Listeria monocytogenes-4B
gccaagcatgctggagcagaagtaatcacaacagctcgtgcgaaaaaccatgaattactaaaatctcttggcgcagaccaagtcattgattataaagaagttaattttaaagatgttctttctgatattgatgtggtgttcgatacaatgggtggtcaaatcgaaacagatagttatgacgtattaaaagaaggcacagggcgtttagttagtatcgtcggtatttcaaatgaagaacgtgcgaaagaaaaaaatgtaacagcaactggaatttggttgcttccaaacggcgaacagctgaaagaacttggcaaattgcttgctaataaaacggttaaaccaatcgtcggcgcaactttcccattctctgaaaaaggtgtttttgatgcacatgcattaagcgaaacgcaccacgcggttggaaaaatagtcatttcatttaataaataacattttcggaaagctagatgctatcatctagctttttttgttgtttgctggaataagttagatgggctataatagcaaaaaaggtggtgtctagatggaaataagagaattgaagaatgggcaaataataatgattcgggaagctacaaaagaggactctagtaatattattacttatttaaatgaagtagctggtgagacagattatttatcatttggtcaaggtgagtttgcgtttagtatagcggaagaagctgaatacatagaagaaaatgataagaacccaggctctgttatgttgttatgttttattgatgatgaacttgcgagtatttctcaacttatggggcatatgaaaaagcgagaattacatacttctgaactagctatttcgatacggaagaaatattggggtctgggtattggcacaatttgcatgggtgaattaataaaatacgctaaaagtagcgagtatttaaagcttatctatttagaagctgtatcagagaataaacgcgcaattaatttgtacaaaaaatttggatttatcgaagctggtgaaattccagcgttaatgcaagtggacagccgttatttagatgtaaccatgatgtatttggttatttagtcttcaataagaaagactagatcattaactacttctatatcactaagttgcttcgcgataatatcggctccagtgttaagaaaaatagcaatttgactaagaatacgaaggctaatgtcagaagtacgaatatctttgtcaataattttctgtaaagagccttcttttaagcgagtattggattcaacatcagtggtagtagtgttattatttgctaacaattgttcaatcggatgcatcatttcacctcgtttcaatagttaactttatgaattaattataactaaatttgcttcttggataaactataaagccttgaaaattaaacaaaaaagggagaagcaaatgaatgatttaaaagacatttttaaagtattgtatcagtttaagacagattatctcaaagtaaccttattattaacaatcttacaggcatttgt

SEQ ID NO: 1939 - DNA, 1929 bp, Listeria monocytogenes-4B
aaatcttcttggccagcactattatccggtttgtggttgacgattagattagccgtagtttcgctaataatcgccttcattacttgggattacattcggatttatgaaagtgagcaatagcaaaatcttgcgcgggattgcgactgtttatgtcgatatcttccgtgtaacaccattaattgtacaagcattcttcttctactttggtattccagcagcacttgatttcaggatgcctgtattcttagccggggttatcgcgctaagcttgaacgccggtgcctacatggtcgaaatcgttcgcggtggtattcaatcagtcgacaaaggacaaatggaagcagcaagaagtcttggtttaccacataaaaaagctatgatgaaagttgttctaccgcaagcaattcgaatgatgattccatcctttattaaccaatttgttatcacgcttaaagatacatcaattatgtcggccattggactcgtcgaactaacacaatcgggtaaaatcattatggcgcgtacattcgaaagtacttggacatggctaatcatcggaattatgtaccttatcgttattaccattttaacgaaaatatccgatcgtttagaaaggagattacgaaatgactaaacttaaagtaactggactgaaaaagagttttggcgcaaatgaagtcttaaaaggcattgatatagaagtaaaagaaggcgaagtagtttgtgtcatcggaccttctggatctggtaaaagtacatttcttcgttgtatgaataacttggaagaaattactgctggcgaagtagtggtcgatgattttaatattacggataaaaaagtggacatcaataaagttcgcgaaaatatcggcatggttttccaacattttaatcttttcccgcatttgtctgttttagaaaatatcacattagcacctgttgaattgaaaaaaatggataaagaagccgcgaaaagtaatgctttacgtttattagaacaagttggcttacgagaaaaagcagaagaatttcctaatcaactgtctggtggacaaaaacaacgggtggcgattgcgagagcacttgcaatggatcctgatattatgttgttcgatgagccaacgtcagcgcttgatccagaaatggtaggggaagttttaggcgttatgaaagaattagctaaaggcggaatgacatctatgatcgctacacacgaaatgggttttgctcgtgaagttgtcgaccgagttatctttatggatggtggctatattgttgaagaaggcaagccggctgatatttttgataacccaaccaacgaaagaacgattagtttcttagataaagtattataaacaaaaagcaagatgactctggaatttccaaaagcatcttgcttttttttactttaaattaggactttttctgtttttcgattgttgttcataggaataccccatatttaataaggttgtatcactatttctagctgtaataaaagttaaactaatcggttgatttgtttcttcatcatagccagctgggatagtcagttctgggtttcctgcaatgggtgctagaaacgtcacggaacctcccatgccaattgttacgaccgcatccagtttatctttttgaagcatagagtcaagttcgttttgcgcctcctgaatcaaattactcgccaaactgtctgcttgtagcttcgtagttgtgctttgttgtgatttgacaagttcggattggccgtatttcatatttctcgctgggttggtctgattaaattgaataattgattctaacgtcgtcataggagcgttgttcacattcaaaaactgattcaaatcatgtttaaagtcagcatttagtaataaggcctttccagcacactgtcggcgctcaagcatgcatgctaggtggcccagacgg

SEQ ID NO: 1940 - DNA, 751 bp, Listeria monocytogenes-4B
  misc-feature (1)..(end): n can be any nucleotide a,g,c or t/u
ggccgttcgcagttagttattaatacatcgaatatggcgccacgtgagttacgcgagcgaattaacaatgaattccaaaccgaagataaagatatattcaatgtgcaattgatgtcatttggtttcaaatacggcattccgattgatgctgatttagtgtttgatgtgcgctttttaccgaatccgcattacattgacaaaatgcgtccgttgacaggacttgatgaagatgtgtatgaatatgtgatgaaatggccagaaacgcagacctttttagataagttagtagatctattaatgtttacacttcctttttacaaacgagaaggaaaaacacacttagttattgccattggatgttctggaggacagcatcnttcacatcctttgacagacttccttggttaggccattccccccngtttgaaacatctatttctcaccctgatttgaaacctanaatgggccgctcctctcnccaaggaaattgaccctccagtcctacccctctgtggctggacccgctcttctgccattttaaatcgcccccccccgcccgctcttccttttcccggcctttgccccccccaccctcccctgtcgttggcctcgtgtgatttcccgatagcgtcctcacaaacttactcaccgtttcttcgccccccccttctacctctcttgcgctccgtgctcctcccgcgccgctttcccctgcttctcacatataacaaatacaacataaaaaaaagaa

SEQ ID NO: 1941 - DNA, 1660 bp, Listeria monocytogenes-4B
  misc-feature (1)..(end): n can be any nucleotide a,g,c or t/u
tgcggcgatgttccagaatttgaaaaaaggtatgtgggttaaagttagaggaagcgttcaaaacgatactttcgtgcgggacttaatcatgatggcgcaagatgtcaatgaaatcgctggagtgaagcgtcttgatactgctgaagaaaaacgcgcagaactacatcttcattctccaatgagtcaaatggatgccacttcatctgttgattcactgttcaaacaagctgctgattggggacataaagccattgctattactgatcactctgttgcccaatctttcccagaagcgtatggagcagggcaaaagtatggcttaaaggttatttttggcatcgaagcaaatcttatagatgatggtgtgccaatcgcttataacgatcaacatattgctttggaagatgcaacatattgcgtatttgacgttgaaacaacaggtttatccgccgtttatgatacgattatcgaacttgctggcgtaaaaatgaaaaatggtgaaattattgataaatttgaagcttttattgatcctggacacccgctttctgcaaccactattaatttaactggtattacagatgacatggtaaaaggttctgatccaattgatgttgttttaaaaagatttaaagaatggagcggtgatgatattcttgtggcccataatgcttcttttgacatgggttttattaacactgcttatgaaaaagttggactagaaaaagcagaaaatgcggttgtcgatacattagaattagcacgttttctttacccacattttaaaaatcaccgcttgaatactttgacaaagaaattcaatattattcttgaacaacatcaccgggctgtttttgatgcggaagctacagcgtatttggcttggaagttaattaaagatgcgaaagaaatgcacaacatcgattttcacgattctttaaatgactatatgggagaaggcgacgcatacaagcgcgcgcgaccattccacgccacaatttacgcacaaacggctgttggtttgaagaatctctttaaattaattacgatgtccaatattaattacttttaccgggtgcctcgtattcctcgctctcagctaaaaaaattacgcgaaggcttaattattggaactgcttgtagccaaggggaactatttgaagcaatgatgcaaaaagggatgcaagctgcagaaaaagtagcggagttctatgatttcattgaagttcaaccgaagccagtttatgcaccgcttattgaacgtgaactagttcgtgacgaaaaagctttagaagaaatattgaaaaatatcgtccgcgtcggtgagaaaactggaaaacctgtcgttgcaacaggtaatgtacattacaaagatccagtggataaaatttatcgtaaaattttaatccattcgcaaggaggagcaaatccgcttaatcgggctgaattacctgatgttcatttccttacaacggatgaaatgttgaaagaatttgccttccttggtgaagaaaaagcaaaagaaattgttgtaactaatgcgaatttagtcgttgattggatggaagaccttaaaccaatcaaagacgaattatatacaccaaanattgatggggcagaagacgaagttcgaaatatgagttatgcgatggcacatcaa

SEQ ID NO: 1942 - DNA, 1880 bp, Listeria monocytogenes-4B
  misc-feature (1)..(end): n can be any nucleotide a,g,c or t/u
gcggtagggggcgaccagtgtgctcggaaagctaaccgaaattgcagataatttatacgaattaattttgacaggggaacgtgtagccgatatgtcaccgggacagtttttaatgctgaaaccgagtcgttctgatttacttatgagacgaccgataagtatttgttcttacgataaaaccgcaaagacatgcattctgttgtaccggatagaaggtgacgggacaagagatttcagtaaactttcagaaggggatactatcgatgtgttaggtccgcttggaaaaggattcgatatcgaccagacacctgcaccaaaaaccgctcttttaatcgggggtggaattggtgtccctcctatgtatcaactcggtnaagagttagctggaaaaggcgtacaagtcacgttttgtaatggattccaatctgcgaaagatagtttttatggaaaagaaatgaatgcatatggcacaggtcatattgcgaccgttgacgggtcacttggaacacaaaggttccgtcacaggacatcacggacaatttttcagaagaacccagatgtgatctattgtttgcgggcaaaaagccatgctccaagccgggaaagctcattttccggaacaaaacatatctttcttttaaaaacacatggcatgcggtattggggcttgctacgcttgtgtttgtccaaaagcagatgatgcgaaaaaacaatttaaagtgtgcgaagacggcccagtatttcgtgcggatgaggtgagtttatgaaccgattagcagtagaaattcctggattatcgctcaaaaacccgattatgccagcatcaggatgttttggcttcggacaagaatatagcaaatactatgatttaaatgaacttggtgcgattatggccaaagccgtgacgccagaacctagacttgggaatcccactccgcgagtagcagaaaccgcgagcgggatgctgaatgcaatcggcttacaaaatccaggtctagagcatgttttggcgcacgaactgccatttttagaacaatttgaaacaccgattatcgctaatgtggcgggtgcgacggaggatgattatgtccaagtctgcgccagaattggggaatcgaaagcagtgaaagccatcgaacttaatatttcctgtcccaatgtgaaacatgggggtatcgcatttggaacagatccggatgttgcgcatcgtttaacgaaagccgtgaaaaatgtcgcaactgtgccagtttacgtgaaattatcaccgaatgtagcggatattgtttccatcgcgcaagcaattgaagccgctggtgcggacggactcacaatgataaataccttactcggcatgcgtattgatttaaaaacaagaaaaccaatcatcgcaaatggaacaggtggactttctggcccagcgattaaaccggtggctattcggatgattcaccaagtccgcgaggtaagcaatatccctatcattggcatgggcggcgtgcaaactgtagatgacgtattagaattcttgattgccggagcagatgcagtcgcagtaggcacgatgaattttaccgacccatttatttgtccgaaattaattagcgaactaccaaaacgaatggatgaactcggtatttcttccctacaagaacttaaaaaggagcgaacaaatcaatgaataaaccaattatcgcgctagatttccagacttacgaagaagtagagacctttttagccaaattttcgggagaaacgctatccgtgaaagtcggcatggaacttttttatagcaacggtccaatcattgttgaaaaaataaagcaacaacatcctttccagcacacgtgcggccgctcaagcagcatctaggtgcccaaagt

SEQ ID NO: 1943 - DNA, 1855 bp, Listeria monocytogenes-4B
  misc-feature (1)..(end): n can be any nucleotide a,g,c or t/u
ccacttcgggtaactgacagctgcttgatgggcgcacagtgcgctggaaatttagcctctgtgaaagaagctttagatgatggactttgacgtttatatattacagatttcgcgacaaaagaattactaaaccacaaaaaagtgcatgtatttcctcatttaggtgcatcgacggaagaagccgaaaccaactgtgctaaaatggctgcgaaagaactgcaatcatatcttgaaacaggtagtattaaaaactcggttaattttccgaacgtggaaatgccgtataatggacatccgcgaattggaatttgtcacaaaaacattcctaatatggtcggacaaattacgacggagctagggaaatattcgttaaacattttagatatgataaatcgcagtaaaaatgaatatgcctacacattaattgatattgataaggaaacgcaagctaatttggaacaactgaaaagtgatttattagctgtgcaaggggttttgcgtgttcgagttattgaaccattaggtgttacggtttaaaattattacccgggaaataatgagagcatgaaactttatggttattgccagacgggttcatgctcttttactaaaaaggaggataacaatggtaaatatacgtccatttaaagcaattcgtccgattaaaaatttagcggaaaaggtggcttccttgccatatgatgtacttaattcggaagaggcgcgcgaacttggtgatgcaaataagtattcttttttacatattgataaggcggaaattgatttagatccggcggtttccccttacgacccagctgtttatcaaaaagcagcggataatttggaacaatttgagttggatggttggcttggtagagaagcaaacccggcattttatatttatcaactgacgatggatggtcgcccgcaaacagggctggttgtttgtacgtcgattgatgattataccaatgggaaaattaaaaaacatgagttaactcgtgaagagaaagagttagaccggattcgtcatgtagatgtttgtgatgcaaatacaagtccgattttccttacttatcgtggaaaagaagcaattaatgcacttgttgagtcttgggtgaatgaaaatgagcctgaatatgactttgagagcttccacggggtcgcgcataaggtttgggcaattacggacgcacatattttagaagacctgtcagcggcgttctcggaagtcccagcgctatatatcgcagacggtcaccatagaacggaatctgctgtgaaagttggtttgaaacggcgcgaggaattcccagaggctgggccagaagcagaatttaatttctttttatcagttgttttcccagaagagcaatttgaaattcttgattataatagggttgcgaatgtgccttttgatgcgggttttcttatcgtagtcgttggctcgttccgtcgtggtgaagggggtgctggatgcctccgtccctgggaagccttcccacgcggggctgtgtcgggatggggctcggggccccctctcggcctttagccgcggcgtccgttcgcctgctgtcggctcgttgtgttgcgccgcccctcccccgccccgtcgcgttctttcttctttgcgcttcctctgtttttccgctccgtcccttcttctccttgtcgttgnttcttttcgccctcctcgcccttgtccctctgtgttgtcccgtgctttctccttctttcttttcttccttcctccctcctcgccccccgcccttgcgtccgtccttcgcccccttctggccttcgcccccccccgcccgcggcgtggcgcgtcctccaaacaaaaaaaaaaagaaaa

SEQ ID NO: 1944 - DNA, 1941 bp, Listeria monocytogenes-4B
aagcttgagcttggcttgatcgaatttatggtgcaaatgggttacgaagacctaagaataaagaagaaagggggaaagtgaatggcggattctaaaagttttacatttgaactgaacgagagcgttttaacagcgcaagttggcaggctagatgagatggcgatggttgtagagcggcggttttcagagctcaaaatgactattgaagatgttggaaatgctgatccaggttcgaaaatttccgaatctttaggtgggctgcagtctgggcttggcacgattagttcggcgtttggacaactgggttctagtagtgaggcgattacatccggattcggtactgcggttggttctgttggtggaatcacggatgcgtttaaaaatctaggttcaagtgtgcaaaatggtacgttattttcaagcttggcaaccgggattggtggcatgagtacaatgcttggtggagtatctggcggcgttcaaggaattacaaatctagctagtggatttatggaattgaagaagcatctaggcggtttgatgtcatctattggtggcgttggtggaattatgggtaaactgacctctccaatggggttagtaattatcgggattgtagcgttagtagctgcatttgcgtatttgatgacgacgaatgaatcattccgaaatacggtgatgtcagttgtaacacaggttgcgcaactgttcggtcaacttgtcgccagtttaatgccgattatcatgcaaattgttactgcggttatgcaaattggtgccgcgttaatgccgatggttatgcaatttattagcttttttgcgcaattgttagcccaattaatgccgtttattaatatgctgatttccatgcttatgcctgttattatgcagattgttcaagttgttatgtcacttgtttcggcactattaccgagcatcatgacagtgattcaaggcattatgagcgttattcaatttttaattccgataatcatgcaaattgcgacggtggttgtacaaattgttgtaacgattatttcttatataagtaaaattatgccgattgttatgacgattattggcgttattgtttcgattatcacaacgattattagttacgtcgttattattgcgacgacgattgctagtgttattgggaaaattattagctttattgcgagtgttattacggcggttatcgggattgtgcaaccaattattggctttattactaatatctttacgactatcgtgacgattattggtgcagctttccaaatggtatttactgttgcatccaaaatctggaatgccattatgacgacgatttccggaattattgaaggaatcaaagcagtcatcacaggtatttctactacggtttcatcagtgtttaacggagtgaagcgcattattacaggtgtttttgacggaatcaaaagtgcttggggtggtttaactgattttgtaggaaatattttcgatggtgtttcaagtgcaattcaaaccgtggtagataatgtcaaaggttttgtaaacgtcgtaattcgagggattaatggagccattggtttaattaataagattccaggcgttgaaatcggcaaaataccacaattaatttccggtacaacaaatttccaaggtggctttgctcgaatgaatgaaggcggccgaggcgaaatggcggctttaccgtctggttctcaagcgatgctcgcaccatgcacccatgaactacgcccgggaaagcgccccccctaatcaattactgcttcaccccactcatcgcccctcatccggctcccaccctccctccccgcccactcctctcctcacccattgcctccacctcccccgcccacgcccccccccacccgggccgcctctacctatagttcccaagagctggtccggagaatgcgtgtgacgcgatgaggg

SEQ ID NO: 1945 - DNA, 2102 bp, Listeria monocytogenes-4B
agtggcgaagtaaaaatttggtgtgatacagaagcatctgagaagaaagtgctacacataaaagacaatggacgtggaattaaggaagaagatttgccacgtgtgttcgagcaaggtttcacgggtaatattggtagacaagagaaaaaagctacgggtatgggtttatacctagctaaacaaatggcaaagaaactaggtcacgaaatttgtattcaatctgaaagcggcgtaggaacagaagtgaaaatctactttgaacagaaagatgattacttactgattgccaaagattaataaaaagtggtacaccaattatgattggcgtatcactttttttgtaaataaaatggttgactctatcgctttatcgtggtagagtattagcaagaagaagtaaaagcgtcgaacagaacaagtagagcgtaattctttaaaagagagtccttggttggtgtgaaaggataaagatagcgttatcgaacacatctcggagctggtttgctgaagcataagtgagtaggtgaactcgggttaagcccgttatagcttgttagtctcgaactaacagaggttggtactgcgaagtatcagcaaattgaggtggaaccacgtgaatattattctcgtcctcttggccaattagcgccaagtgcgacgggatttttttatgttaaaaaaggagcgaagaatgatggattatatcatggagattttaccagcattacttgatggggcaaatcttcactgctcgtttttgcagttacgttagtttgttcgatacctctcggggcggttgtggcagtcggaaatattagcaaaatagccccacttaaatttattttaaatatttacatttggattatgcgaggcacgccattacttttacaattaatttttatttattatggcttaccgattatcggggttgtttttgaccgaatggatgccgtttttattgcttttattttaaattatgcagcttattttgcagagattttccgcgggggatttctttccatcgaaaatgggcaatatgagagcgccaaggttttaggtcttacttacggccagacactgcggaaaattgtcttaccacaagttgtcaaacgtgtcttaccagcaattgggaatgaagttattaacttagtaaaagactcttctttagtatatattcttggaattggcgacttactaagagcagggaaaattgctatgagtggagatgttacactgattccactcgtattagtagctgcaatctacttagctttaacggctattctaaccatattatttaaacaactcgaaaaacgttttagttattataaatgaggtgaagaaaatgttagaaattaagaatctatcgaaaaaatttgatcaaaaaacaattttagataatgtgaatatttctcttcaagatggtgaaattctctcaattgttggtccatcaggtggtgggaaaacaactttactgcgctgtattagtggactggaaaaaatggatacaggtgaaatttttattgacgaggaaaaaattgatccaatgtcgagaaaagatgtggaaaatacgattggtgttgttttccaagaattccacttatttccgcatttaagtgttttagataacttgattttagcaccgacccttgctcgaaaaacaaagaaagcagatgccgttaaagaagcagaacgattacttggcttacttgatttagccgataaagcaaatagtatgccgtaccaattatcaggcggacaaaaacaacgggtcgcgattgccagagcgcttgcgatgaatcccaaagtgctgctatttgatgaaccgacatccgctttagatcctgacttgcgcgatcatgttgcagcattaattttaagtttgaaaaaggttggtattacgcaaattatcgttacacatgatcacacttttgccgaaaaagtagcggatcaaatgatggaagtagaaccattaaaaaaggaggcaatctaacatgaaaaaaggattattaataactgtaatgttaatggtaatgttagcgctgggagcttgttccaaaggtgaatctaaagaggaccatttccagcacactgatggagga

SEQ ID NO: 1946 - DNA, 2054 bp, Listeria monocytogenes-4B
atccaaaagatgccggttttcttgtgacagatgaacatgctagcgcgcaagttttaccagaatcctatgatcgtttgtttgcacttcgagaaagagaaggcattattgttttcccaggatttttcggttatacgaaagacggcgaaattagcacgttttctagaagtggctctgatattactggagcgattgtggcaaacggcgcccaagccgagttatacgagaactttacggatgtggatgcagtctacgcagtcaatcccgctatcgtgaaaaatccgaagaaagttcttgaactaacttaccgggaaatgcgtgaactttcatatgccggcttctctgtttttcatgatgaagctttaattccggctttccatgcaggtattccggtgcatattaaaaatacgaacaatcctgattcttgtggtacgcgtgtcgttcatgaacgcgaaaataacaatggtccagtcgttggaattgctagtgatgacggcttttgtagcatttatattagtaaatatttgatgaaccgagaaatcggcttcggacggaaagtgttgcaaattctggaagatgctgggttgaactatgaacatatgccgtctgggattgatgatttaacgattattattcgcgaaaatcagtttggcgaggataccgagcagacaattatgtctcgtttgaaagaagaattgaacgcagatcaagtgattatgcaacacgggatttcgctgattatggttgttggtgaaaccatgcgccataatgtcgggattacgtctcgtgcttcaaaagctctatccgatgcgagaagtaaatattgaaatgattaatcaaggttcttctgaggtgagcataatgtttggtgtgaaagaagaacaagaaaatacggccgttcgcgcactatacaatgaattcttttcagaagtcttagtctaaaaaaacaagtttctcatcctgattgaggagaaacttgttttttattatttaatcacttcttctaattgatagtctttggcaattacgtcaataatataatcataagtgctaacgcggtaatgcttaaaatcttgagcgttatagtcatctcttattttcactcgttcattgattaaatccgaatcctgtatctgttcaaaattgctctgacttgttaaccaactagtactccatttgcttttttcgtaggtgtcaagttcggtggatgagtggaaaataaacccgttaaaaatcatctttaggaacatgctttcttcaaggtctacttctatagatagtgtgagttggtcaggagtatggtttaagctgataagccatatttggtctctgccgtaaattagttggttgttgatttttattgggtgggatgtttccacagatatacaattcctttcgacgagtaacttacctatttttactactattcactctttgagcagctttattcactaaggtattttccccataaataataaaaaatacctttaagttaaatcttagtatgtattttataacctagcatcttttcgattttcttttttcgattttttagttgattcattattaaattatttgtatttggagatatttcatcaaatttcttttgagctctttttgcatatgaaataaagttaccgtgattattataattctttcctaaatctgtacacaatccataaatttttttcttataaggtaaatcagtcaattctttttttacttttactttctgagcaaacgttataagtttttttgcatttcggtaaaatttatacggactcttccctctcattttaactgtagtgccatcaaaaacgaaacctaaataatctaaatggcttacttcattgctaattatgtcaaaaattttatcattctcgtataaatacagtcctgttttatctttatgcaactctattttatattccgaagctacccttcttgtatcagtttcaatccttctaattttttgctcatttactatatcgctttagggatactagctaaatcatcggatctgttattccaaattcccgaatcttagtcataatcat

SEQ ID NO: 1947 - DNA, 2099 bp, Listeria monocytogenes-4B
agcggccgacagtgtgctggaaagaatgttggactgcacttcaatatgaaattggtgttatgccttgcgctgcaaacgcgatgctcatagatgaaggaattccagttgtttgtgaaacagatattcatggagcaatttcttgtttattaatcgaagcggcaaatttgggcagaaataaaagtttttttgctgattggactgttatacatccagatggtgagaatggtgaattgctacaacattgtggactgtttccgttttctgttgcaaaagataaaccggcaattggctatccgttagcatttgattcacctggtgcagtcgaagcggaagcgaaaggtggcgaattaaccttatgtcgttttgatggtgataatggcgaatattccttgttactgggtaaagcgagaggtattgaaggtccgtatacaaaaggaacatatctttggattgaggtagataatttgaaacgattagaggaaaaaatcgtttcaggaccatatattcatcatgttagtggtatccatgcagatgtggcccctattctttatgaagcatgcaaatacattggcgtaaagccagacctctatgatccaattgaagatgatataaaagcttattcacgcggcgaatagagaaaggagtgaaaaatgagtgaatgaaagctaaaatcgtttgaaattaaaaaagatgttctaaaaatgatatctgatgcacaaacgggacatactggttcagatgtatcatgtgcggatattcttgtggcgctttactatggcgtgctgaatgttaatccggactatgccagaagctttaggatcgtgatcgttacgttcgaagcaaaggacatgctgtcgaagttctttgggcagtcttagcagataaagggctttttgctgaagaagaattggctgatttctccgcatgtggctcgcgtgtaatcgggcatgcaaataataaagttgctggaatcgcaatgaacacaggttcgctcggccatggcctatctgtttcggtgggtatggcattagctgctaaaatggatgggaaaagttatcacacctatacactcatgggggacggggaacttgcagaggggtctgtctgggaaggtgcaatggctgcagcaaattataaattagataatttgactgcgattattgatcggaactcctttctaaatctccggtcgaacagaagatgtaatgagtgtagaacctttggcagataagtggcgcgcatttggttggaatgttatcgaagtggatggaaatgatccggataagctacaagcgatttttaaaacagttaatgtgactggaaaacctcgtctaattattgcaaaaacgataaaaggttatggggttaaaatggctgaaaatgctgctaaatggcatcattacgtaccaagcagtgaggaatacgaaatagctatgaaagatttagaggaaagaatggaggcgtgccgtcatgaataaaatagcgaaccgccaagtaatgtgtgaagttttaatgaaagaagcaactcgtaacgatagtaatttagttgttttaacaagtgattcaagaggatccgcttcgctgggggcttttgctgagaaatttccagagcgactagttgagactgggattgccgaacaaaatattgttggaattgcagcaggcttagcacatagtggcaagcgagcttttgtcgcttcaccagcatgttttctaagtatgcgcagtattgaacaggtaaaagtagacgtggcttactcagacacgaatgtaaaattgattggtatcagcggtggtgttagttatggtgcacttggtatgagccatcattcgcttcaagatattgctgttactagagcgattcctaatttagaagtcattctaccagctgatcgtctggaaacggaagctgtttttgactatttgcttcaatcaaatcggccggcgtacgttcgtcttggcagaaatgcggtagaagattgttacgcagaaaaaccagtatttcaaattgggaaagctggaacccttaggaaaggaaacgatgtgtcaattttagcaactggtgaaatggtacgagtcgcacttgttgcaaaggaaaa

SEQ ID NO: 1948 - DNA, 1228 bp, Listeria monocytogenes-4B
gccgagataagtcacttgttgaaattggccgttcaagtcccgtttccgaacaaattaactctaaattaagtcgttcctttaaatcctttaccgtaaccgattttgtcatgcaagtacctccaaatgaattataaaagtccattactgttcgctacaaaatattatttagaaagctccttctcattttagcactttagaaggaatcaagctacctctttctactcaaatggctctacatagcaaaaccagctacatttaaaagactatttttagcctcaaaatgtagctggaatgtttatttttctttgttaccccataaaacggaattaataatcatgtttgcgaatgccataattgctgcgagaattaacgctgttccaaaaccatcaatttggaaagaatctccaataaagaaggtagtcatttcaagcataattgcattcacaacaaaggtgaaaagtccaagtgtgaaaatattaattggtaatgttaaaaggagtaaaataggtctaattagcatatttagaattgctaatataaaactcgctagtagcgctgtcgtgaatccatctacatgaaaacttgtaaagaatcctgataaagctacgaaaagcaccgagttaataattacgcctataatccaacgcatgttttagttcactcccattctgattcaggtgttgctgttggcataataatcgcagctagaatatacagtaaaatcccagtaccaaagaatagaactgctccagcccaaagtaaacgaatgatggttacttcaatgccaaagtattctgcaagtccaccacagacaccagcaatcattttttgtgaagaagatttatataactttttcattgttttcccttcctttcattttattaaacgttctttgtttccagttcagaaactttaataattccatttcctacttttgcttgaagtgtcgccatgcttatttcttctgcgttttgagtgaagacaaaagttctttctgcgtcatcccaaatttttgcattttttaagtcaaaatagattttttcttttttagttccaagtgttccatcgacattccatgttggcggaatttgaattcgaatatcgccatttggtgcttctaaatctgaggccgaggaagtatcattttcgagtatatactcaacgtccccttgtgcagctttagcaatcgttgtaagaaagctaccttgaagcgcaatatctcctttag

SEQ ID NO: 1949 - DNA, 693 bp, Listeria monocytogenes-4B
gctcgcctagattaagttcgtccgcttttttattcatagcatcgacaaattctttttcagaacctgcaattttttcggaaatagcaattgctgctccgtttgcagagtaaatcgccattgcttcatataattcttgtacagtgtattcttcgccaagtctaagtggtacgttcgatagtgatgtgtcttgtgaaactttgtaagcatattcagaaatggttactttgtcgtcccatttaatttgtcctttgtcaattgcttccagtagtaagtattcgtccatcatttttgtcatggatgcgatgcccattagcttgtcagcgtcttttgaatataaaattttaccagtactttcttcaattgcgattgctgcgtttgcatttacatttggtgcttctgcggcttgtgctgctttcgggcttactaagaagccacttactgcaagggatgctgccatgattacaatccctgtttttttaattatgtttttcactgcaacttctccttcatttgagtaaattattaactcattttatctatattttaataaagaaacctatcataaaaattcccttttcgaataagtttcatttttttgacggatactttcatattttaccatgatttagtagtgccgtatataaaacttttcgcccaaaaaaccactttccagcacactggtggcccctcacg

SEQ ID NO: 1950 - DNA, 1519 bp, Listeria monocytogenes-4B
actaataggtcactctccatccatgctcgagcggccgacgtgtgctggaaagcatcgtcaaaagggagtagttgttcatccggatggcgtagctaaggcagatgagctattttttgctaaattacaaacgaagctaaaaccacttatcgcggaatcggttgtgcgcggtgttaccgaagagaagtggctcgaagtaagtaaggctatttttgacgaaatgcatggacggattagtggagtagaaatggaaatcatcatttatatttttgttagtattgctatcatttcactgcaagcaataaccccttttgtaataagaaaatcagaatgtttcggagtaaatgtaggcgaacgcgctaaccgaaatgcggaattaacgcggctaaaaaaacaatatgtcgggcaagtggttttgtggacctctttcgttgctattatcggaatcgcattaattcaaggctttcattcgagtgagaacatgcaagcgggtatttttattgcttcgatgtttggacaattaatcgtttcttttattatttattatcgctttcaccacacaactttacagtggaaaagagataaaatagaggcgggagaaatttcgactaattctatcatcatggtagatactagttttcatcgcagaaaaatggttatctcgtatacatggtttgtcgtgccactgcttatcttcattattacacttgcgattacggtcgttttttatccagtagctcctgctgactttccaatccattttgatatgagtggggcagtgacggatacggttgccaaatcacctagagtcgtattgctattaccgatgatgcagctaggaatgattgcgttatttatctttattaactttgttattgctaggagcaaacagtccgtagagaacgaaaaccctactgattcattaaaaaggggactcctatttagacagatttctagtaaagcaatgttaattatgtgtacgattatggtaattgattttctcatcatgcaagtagtcacattacttgcacttccagctgaatggatgatgattacaatgataatttccgttgttttgattctgtttggaaccgtccttcttgctgtaaaagtagggcaaggcggaagcagacttaaatttgctgaccaacctgatggtgtcaataagccaattcgggatgatgattctttttggaaagcaggggttatttattttaatcgaaatgatccagctttatttgtagaaaaacgctttgggattggttggacgattaacacagctcgccctgttgcttggttatcttttatcattattatcgctgttattattctcattagcatcttgttttaacttgctctcagacgggtatttaccatatggtatacggataaattagcttgtgtgagatgcttttgtgaaggagtagataatcatggcgattagattaaagcgactggaggaatgggaaggattcactggtattgcgctcgttcgagaaggtcttaaaacagaagcacttca

SEQ ID NO: 1951 - DNA, 2176 bp, Listeria monocytogenes-4B
cctgcgagcggccaccagtgtgctggaaagggcagtgaaaagtagagattataatcgccaactcttaaccgcacttgaggtgatttttagtggtaattaaagcgaggtgtccggcatcttgtggcgaacttttgcaaggctggattttaggcggagagaagctaatttcatacccaatcaactggtattccgaagtcactttatctgataaagtaggactaaataactccgggcatacaaaagcatggctcgcattccaaaccacttgcgagtattttggtgtggctaaaagagacctcccgcaagtatctttacaagtgaagtcaactattccggtcgcgaaaggcatggcaagttccaccgctgatattgccgcaacaattggcgctacagcaaaatggctgaataaatctatctcagaagctgaaattgccaagctatgtttacaactagaaccaacggatagcactatttttgaatcactaactttgttcgatcacttaagaggggacatcattcaaagctccaattggatgccaaagctaggcgtcgttgtgttagaaccgcttaccattttagaaacagctacttatcggcaagaaaatcaccaagcgcaattactcaaaaacgaaggacatctagcaaaaggaatggactattttcaacaagccgtcacgcaaaaatccattcacttacttggtaaagccgcatcagttagtgcagcctgcaaccaaactattttgccaaaaccattttggcgagagattgtggaagtgacggaaaacttggatttagtggggttaaatgtttcgcatagtggtaccgttgtcggtatactttatgaactcgaaaaaacggatccactcgaaattttatttgagctagaacggcgctatgtcacgactttttacagtcgatattatttccgtgagtttgtcagtggtggggttcaaattatctcgtaaagcaaattcttcttgcaagcggtctattttatgctataataactttgataaacgaattcgttcatacaaacagttagatactggaagtctggtgaaagtccagcacggtcccgccactgtaaggagttagacactctaagtcaggtcttttatctaattgttttaactggttatactgcttcgaggcaaagcatgtataattcttggttccagtgtagttgtctcactggggcttttttatttgtttttaaaacaaataagcccactgtaaatggtttggtgccgagaagctgaacgagctacgttttatcaagcaccatacgcacaaagatgtgcaccgcttcgttttatggtgggcaatgatcttttcaacgacgaaaagagtgatacaaggaatgtatcttcattgcctatttacaaaaaaagatttgacatttccacgggtttggtttttaataaagtggacaaataaaatattttacggtacaaaggcgtactgtttacttagcaaagaagctttgagttggaagaggaaatttctctactcaaagcttctttttttattttaaaaaaactaggaggtaatctcatgcaaaaagttagttttaaaacagatctttatattggccaaggagcaacagatcgtttactcgattttaaagacaaacaaatctttatcgtaacagatccatttatggttagttccggaatgattaatgcgattacagaaaaaattgatccatcgaatacatatacgatttttagcgaaatcattccagacccaccgattgaaaacgtggtagcaggaattgaagttttgaatgaatgtgatgctaacttgatgattgcaattggtggcggatcagcgattgatgcggcgaaagcgatgaaattcttcggccaaaaacttggtacggtgcgcgcaatgcctttcattgtcattccaacaactagtggaactggctccgaagtaactagtttctctgttattactaacaaagaaaaagccattaaatacccactaattacagatgctattttgccagatgaagcatttttagatgcagacttagtaaaatctgttccaccagcaattacagcagatactgggttggatgtgtttacgcatgcgctggaagcctattgttctacaaaagcaaatgattactcggatgcaatggcgggaaaagtgatgcaattatgtttgccct

SEQ ID NO: 1952 - DNA, 1718 bp, Listeria monocytogenes-4B
tctaaatcgtgacgctagtaaaggtaacgcggtcaaagaactttccgaaaaacttggcattaagcaaagcgaagttatctgcattggcgaccaagaaaatgacgttacaatgcttgaatttgctggtcttggtattgcgatgggcaatgctccagaaagaattaagcaattagctgactatacgactgcatcgaacaatgatagtggtgtagcaaaagcaattcaaaaatttgtgctggataaataaaacaaaaacgcagattcgaataggaatctgcgttttttaactatctttttaaaagaatatactttaaaatatattagtagagttttttaataaaaatcgctttaatggaggttatattaatggaacatcaaaaacgttcaccattcccgaaagatttcttatggggttctgcatcggcagcttatcaaatcgaaggcgcatgggacgcagacggcaaaggtaaatcagtttgggacgaatatgtccgcattcctggaactacttttaaaggtacaaatggcgatgtagctgtcgaccattatcaccgttataaagaagacgtaaaactaatggcagacgctggcctaaaagcttaccgtttctctatcgcttggactcgtatttttccaaatggtaaaggcgaagtgaatgaagctggattgaaattttatgataacttgattgatgagttgcttaaatatgacattgaaccgcttgtaacgctttatcactgggatatcccacaagcattatttgatgaatacggtggctgggaatctcgccaagttattgaagatttcacaaattattctctaacgctattttaacgttacggcgaccgcgtgaaatattgggtttccttgaatgagcaaaatatctttgttggtatgggttatggtcaagcgcttcacccgccaaaagttagcgatccaaaaagaatgtacgcagtaaaccatattgcgaacttagctaatgcgagtgttatcaaagctttccacgaaatcgttcctgatggaaaaattggaccaagttttgcttacacaccacattatccaatcgacacagatcctaaaaacgttcaagctgccgacgatgcagaagaattaaacagttatttctggatggatatgtatgcttttgggcgctatccgaaagcggtttggaaatatttagaagaaaacgatattgcgccagttattgaagacggcgatatggaacttcttgcttctgcaaaaccagatttcatgggcgtaaactattaccaatccgcaactgttgcttacaacccgcttgatggcgttggtcaaaacaacgaaatgaacttcactggtaaaaaaggtagcacgaaagagactggtgttcctggcgtttacaaaaaagtcgttaatccttttgtgaaaacaacgaactgggactggacaatcgatccaaaaggcttacaaattgcgcttcgtcgtattaacagccgctatgctttaccaattttaattacagaaaacggtttaggtgaatttgataaattagttgatggtgaagtaaacgatgactaccgtattgactatctaagcgcgcacgcaactgctattcgcgatgcaatcagtgatggcgttgatatgttaggctattgtacttggagcttgccagacctctctagctggttaaacggctctcaaaacgttcccggtctgtgtgtggtaacccgcatgagaaa

SEQ ID NO: 1953 - DNA, 1731 bp, Listeria monocytogenes-4B
  misc-feature (1)..(end): n can be any nucleotide a,g,c or t/u
ggttgactacttcgggtaattagtttcactgcattttcaaaatcatcacggtgtagcatcgaggaatgagaatgaatgtagcgtgttgcaatggtaatggatagagacgggattccgtttccagttaagtggatggaacctgagtctgtaccgcccattgggattgcttcaaattggtaagggatagatagttcatccgctacatctgtgacaaaatcacgaagtccggcatgcgctaccatagatgcatcgtaaatgacgatttgtggaccctcacccattttgctcattgcttctttgtctgtaacgcctggtgtatctcctgcgataccaacgtcaacggcaaaaccaatatctggttgaacgaaatgcgcagctgttttggcaccacgtaaaccaacttcttcttgaacagttcctacaccgtaaacgatatttggatgttgttctttttgtaagtttttaagtacttcaatcgcaattgcaaggccaatacggttatcccatgcttttgcaagtaagaatttttcgtttttcattacggtaaagtcaaaagcaggtacaatcatgtcgcctggacgaatgccatagctctccacttcagctttatctactgcaccgacatcaataaacatgtctttaatatcgaatgatttttggcgttctgctgctgtcatcacatgtggtggtttagaaccgataacacctgtgatttcttcgccagagcgcgtcacgatagttactttttgtgcgagcattacttgggaaacccagccgcccacagtttgaaatttgataaaacctttatcgtcaatttgcgttaccataaagccaacttcatctaaatggccagcaatcataattttaggtccatcttctgctccgactttttttgcaacagcacttcctaagccatctgtttcaaaactatccgctagcggttcgatgtattcgcggaacacatttctcactgcacgttcgttaccgggaataccttttgcatctgttaatgcttttaacatctttaattgttcatccatataaataaccctccttataaactccattttcattataacagtttctttctaaaaatcctttgaaaacgcaaaaaaagccgagtaatctattcagctttttttgcaaggttattaccagatgatggattgaacgttcagtaaaggtaaattaaaggcagttttctctttggtgtctgcctttgctagttttgttttgtgtagctcagatgtatcgatatccatattgattactaaacgattgttgtcatctgtttttagtaatgcatctactgttggcgcatagtcttctaattgatagaagtctttaatcgatgtactttcaatccaaccgatggattctccattttgatggatatggtaccaagaaatattggaatctgttacttttacttcttgattaatagaaacttgacggccaaagtatttggtagtgctgacgataggtttcgcaccttttgtgccacccggagcagaccaaacatagcaattatctttgacagctacttctccagcagccttaattgctttgtctgatacacgttcgctttaaaccgggttcgtatttatttaaatctggcttgtttgatcaggtcaattcatttcgctgcctactctggatcagatgaatggnctgggtttccagggctntcgctgncttggcgagggcgccgcgttgattgaacaaaaaaaa

SEQ ID NO: 1954 - DNA, 2004 bp, Listeria monocytogenes-4B
  misc-feature (1)..(end): n can be any nucleotide a,g,c or t/u
gatttaatcgtatcaataagcatcagaaccacgatgagtgcaggaataatccagccaccccagcttaaaatccaatccgcaaattcggtgacaagtgggtgcaagaagcgtacaacgataatacaagcaaatccccaaaaaatcgaaatcggcaagcaaattcgtcctttttcattgagcggccagttgtgataatcccaccatgttgtatggaataatgcttctaaaatcgttgcggtaacatattcaatcaccgtacaaataatcatcgaaaaaataaataaggcccataagttattttgaaacggtaaaatcatcattaaaactgtcgttaccccaaacccgtaaatgggacaatatggtccataaagaaaaccacgatacactaacttcttctctgaaatcgagcaaaaaatttcctcccaagcccatccaagaacagaataaatgaagaagtataggataaacatattaatatccatcttttcatctcctttttgttttctttttcacaatcaatttcattataacagaaataagaacttcttaactaaattagtcaaaaagttccgcttgtttatattttggcaacttattcttcgcttctgagtacgcatgctgaattaatgcgcgaatcaagtctttatctcgttcttcttccaataaaacagaaatccaaactcgtttattcatgtaataaccgggaacgatggctcgattttctgcgcgaagttgctcacttttttcggcatcgcacttcaaggttaaaatcggctgcccttctttattcgttccgcgcattgccattagctgatccaaaacgtgatagcgctccgctccccattcttctttaaacgaatactggactcctttaagaccactaatttccttctgtatccaagcaaattcatcgctcattgtgcgggctccaaaatcataatcttattgccatctgggtcaagtaaattcagttcacgtccgccccactcagccacacgaggttctggtgtctccactcccgctgtttgaagttcccggtacatctcatccaaattagtatcacacgagaaaacaaactccactttagattcgcttgcttcgccccatttgctattattccaaacaataatcccgggagccttttcagaaaaacctaatttcgctccgtcataattgtcgtacccttcgaatactatcggaattcccaaattttcgtgataaaacgcaaccaacgccgccggatcttgcgtggaaatatttgtacaaacaaattcattaatcattttaagcacctccatatcgttagtttaacaaagcatttacgtttttcattgtatatttgcgacattttgcagaaaaatttgcttcatttcttctggggtgtgattactatatcgtttaaattgtttaattaagtgagcctggtccgtaaaaccatgaagataagcaagctcagcgcccggcacacttggattctcatataatgcctgtaatactttttggaaacgaataagttttgctgtctgttttggtgcaagtcccatgtgtttttgaaatagccgttctaactgccgaacagatacagctcctaacgcaagttgattgggattttgtagtaacttatcaataccgtttaaaaaatcaggatggacttgcttgccaagcatcattaattttcgcagtaaaaattcttctaataaagctattctttccatgttcgtcgtcatttcagcaaacctctcttgaaaaaacgaaacaaatccagcaaacatctcttccggctcttttacccgattcatgctaccagtcaagtcctgttcgacaaataaaaataacgaccacgcataaaatcgcacggcaaanagctcggtattactttcatcgtcagactcaaacggtgcatcactaacgccaacaaatatagcatccgtcactagccctgntttactatcaattgtaaaaataatatccgcacataaatcagggaccactaaattatttgca

SEQ ID NO: 1955 - DNA, 1052 bp, Listeria monocytogenes-4B
ctttagcaactagcagctgctcgagcgccgacgtgtgctggaaaggatatgctagatgtacctttaattggctttgcaggtgcaccatttactttggctagctatatgatagaaggtggtccatcgaaaaattatcaccaaacaaaaagttttatgtatcgcgagccagaagtttgggcaatactaatggaaaaacttggtcgaatgactgcgaattatttaattgcgcaaattaatgcgggcacttctgcggtgcaattgtttgattcttgggtaggggcacttagtcgagctgactatgctgaatacattcgaccagtaatcgaaatgattgttagagaagtgaaagcagttcatccaacaaccccaattattatgcaagcagttggcgcgagtcatcttttagcagaatgggaaacaatgccgcttgatgttgttggcgtcgattggcgtgaaaccatcacaagtgctcggaaaaaagttccaacaaaagcaattcaaggaaatctggatccgtccacacttcttgcaccagagaaatgtttaaaagaagcaaatcgtattttgcaagaaggcgtactagaaccaggttatatttttaatttaggacatggcgttttcccggaagtaccaccagaaatgttgaagaaactaactaattacatccatgaacgtagcgaaattctattaaaaaaggatgatataaaatgactaaaaaagtaggtctacttgtaatggcatacgggacaccgtacaaagatgaagatattgaacgttactatacagatattcgtcatggccataacccaagtgaagaaatgattgcggatttgcgcggaacataccttgcaattggcggattatctccactcgccaaaatcactgaaccccaaccctctggcttgcaaaaacccgcccccgactccccccgccgcccccccatcccctggcgtgtgtcggcctcgccgcctgtgccccccttactgttgcccgccctcctccccgcgctgcctgccgcgccccgtcccccatcccaaaaacactaaaaaaaa

SEQ ID NO: 1956 - DNA, 1546 bp, Listeria monocytogenes-4B
ttttctgtgtttgtgtgggaagaaggcatgagggcgacaaaaagagataggagagagtaagagggagggggggagcggggggaacggggggagggggggaggtgcggagggaaaggggggggagaggaagaaacgggcgaagagggcgggggaggggcgagggtgggagaaggaagaagcgggggaagcatgaagagatgtgagggaagcgaagaggggagagagcgagggcgagagccagtgtggtggggattcctggggagggccagatgtcagagacaggaggtgcgagttcaatatggcccatacgttcacgacggacttttgatttcgttacttctactccacaacggtcacaaactacgcctttatagcgaacacgtttgtatttaccacaagaacattcccagtctttcattggtccaaaaattctttcacagaataagccatcacgttcaggtttaagcgttctgtagttgatggtttcaggtttttttacttcaccatgagaccatgaacgaattttatctggagatgccagaccgattttcatatactcaaaattattaacatctaacaagtgcccaacctcctaaattagtttggagcattcgctttaggaagcgcttggggattcccgcacacttcccagacttttcaggtaaagccttagcgatcgcttaattttatattttgcaaaaaacaaatcattgtttcttattgttttggagtctcaattatcgaaccgaattactcagtcttttcagcggctgcattttccggttgtacgatattgaaggcatcattttgattagtaaagtcgtcatcatccatgtcacgcatctcgatttcttcttcgtctgcggaaagcattttaacatccattccaagactttgaagctctttgatgagtactttgaaggattctggcacaccaggttctggaacgctttcgcctttaacaatcgcttcgtaagttttcacacgaccaaccacgtcatcggatttaatcgttaggatttcttgaagtgtataagcagcaccataagcttccagtgcccatacttccatctcaccaaaacgttgtccaccaaattgtgctttaccaccaagcggttgttgcgttactagagagtaaggtccagttgaacgcgcatgaagtttatcatcaaccatgtgggcaagtttgatcatgtacattacacctacagagatacggttatcaaatgcttcaccagaacgtccgtcataaagaattgttttcgcatcgcgggccataccagcttcttccactgtgctccaaacatcttcttcattcgcaccatcaaatactggtgttgcaacgtgaattcctaaagcacgagcagccatacctaagtgtagctctagtacttgtccgatattcatacgagatggtacccctagtgggttaagcatgatgtcaacaggtgttccgtctggcataaatggcatatcttcttcaggtaaaatacgggagataacccctttgttaccgtgacgtccggccattttatcgccttcgtgg

SEQ ID NO: 1957 - DNA, 1404 bp, Listeria monocytogenes-4B
  misc-feature (1)..(end): n can be any nucleotide a,g,c or t/u
atctgcttttggtgcttcggatttaccgataaagccaacaagcgctaagatagttaatacataaggcgcaatttgtaagtaaacgtctggaatgtctttgaagaatggtagcgatccgccggtaattgccaaacattgcgcaaatccgaagaaaatagctgcccccattgctccaagtgggttccatttaccaaaaatcatcgctgcaagggccatataaccttgaccggaaatagttgcgtgtccgaaatcaagtgtaaaggattgggcgtaaaccgcgccacctagaccgccaaggataccagaaatgataaccccttggtatctcatccagcgaactttgattcccatcgtatctgctgcaagaggatgttcccctacagaacgaagacgaagaccaaaacgcgttttataaataataaaccaagatgcgattgcaaatagaatcgccacataactcattaccggaatgtttttgaagaaaatatcaccaataactggaatatcacttaaaacaggaatatccggtttaccaaagtagtacttaatttgatctgtttggcctttatcataaattacttttacaaggaataaagatagaccggttgctaaaaagttaatcgctacaccactgattacgtggtcagcgcggaagttaatagttgcaacagcatgtacaagagagaataatcccccaacgaccatcgccgcaataagtgaaatccaaggagttaaattgccgaaagtgtcttggaaagtaaggttaaagacgatagcagagaatgctcccataaccatcataccttctagtccaatattaaccacaccgcctcgttctgaataaacgcccccgagagcagtaaaaattagtgggcctgccataagcagtgtactagaaacaattgttgctaaaatggctgtcattctgctttcgcccccttcttaaattttgccatcgcccagcggataatgtagctggatgccacaaagaagataatcagagcgataattacgttgactaattcgtttggaacgcccgcaactgctggcatgtttagtgctccgacttttagagcgccaaacaagatggcagagaagacaatcccaattggagaacttcctccgagtaatgcaacggcgataccgtcaaaaccaatccctggagaagaagttaatacataagccgttccgtatgttccaagaccttccattacgccaccaagaccagcaagcgctccggcaataaccatggaaaagataattgttttctttacactcataccggcatattgcgatgcattttcgttaaatccaactgcttcgatttcgtaaccaaaagtagttttgtttaacatctttccagcacagtggcgcccgtncaggcaaagantagtgcccancagt

SEQ ID NO: 1958 - DNA, 1945 bp, Listeria monocytogenes-4B
cgtcccttttattacacaagggatggcagcgaagcaacgcggggcggttatcgtaccagaaggctatcacccagttggcgtgccagatggatatgattcatattatttgaacgtaatggctggaccgaaacgggtttggaaatttcacaacgatccggaccatgaatggattttagaacgagactaagaggaggatttggagcatgaatctaaacaaacatagcgaacgaaaatttgatttaatcacagtaggacgcgcttgtattgatttgaacgcagtcgaatacaatcgtccaatggaagaaacgatgactttttctaaatatgtgggtggttccccggcaaatattgcgataggaaccgcaaaactaggcttaaaagtaggctttatcggcaaaatttctgctgatcaacatggtcgttttattgagaaatatatgcgtgatttgagtataaatacggacggaatggtgaaagatacggaaggccgcaaagttggcttggcgtttacggaaattaaaagcccagatgaatgcagtattttgatgtatcgcgaaaatgtagcggatttgtatttaacgccagaagaaatttcggaagattatataaaagaggctcgcgtgctgctcatttctggaacagctttagcgcaaagtccatcgcgggaagctgttttaaaggcagttagtttagctcggaaaaatgatgtagccgttgcttttgaattagattatcgcccttatacgtggacaaacaccgaagaaacggcggtttattattcacttgtcgcagaacaagcggatgtgattattggcacgcgcgacgaatttgatatgatggaaaatcaagtcggtggcaaaaatgaagcaacaaaagcgcatcttttccaacatcaagcagaaattgttgtcattaagcatggggtggaaggctcattcgcatatacaaaagcgggagaaacattccaagcaaaagcatataaaacaaaagtgctcaaaacattcggcgcgggagattcctacgcatcagccttcttatacggtttatttagcgggaaagtatcgaaacagcccttaaatacggaagtgccgcggcttcgattgttgttagcaagcatagttcctcagacgcgatgccaacagctgatgaaatcaaagcgctcattgctctcgcggaataggaggagattatggtgactgaaaaaacgattcgactaacaaccgcacaagctttggtaaaatttttaaatcagcaatatatcgaagtggacggcgaaatggcaccgtttgtggatggtattttcacgctgtttggacatggaaatgtggttggtatcgggcaagccttggaagaagccccaggtcatttaaaagtgtatcaagggaaaaatgagcagggcatggcgcacgcggcaatcgcttatgcaaaacaaaaaaatcgccagcgcatctacgcgtgttccacatcagcaggaccaggttccgcgaacttaataacagcagccggcaccgcacttgcaaacaatttacctgtgttattcctgccggccgacacattcgcaaccagacagcccgacccagttttgcaacaattagagcatgagtcgagcacggcaattacaaccaatgatggcttccaagcagtctccagatattttgaccgtgtgcagcgaccagaacaactcatgagcgccctgattcgcgctttcgaagtaatgaccaacccagcgagcgcgggaccagcaacaatctgcattgcgcaagacacagaaggagaagcattcgattatccagtcgaattttttcaaaaacgaattcactatcttaatcggcaaatcccgacaaagcgtgaactaaccgaagcagcgcgactcatccaagcgagcaaaaccccagttatcatcgtcggaggtggcgcccgctattcaagagcacgcgaagaatta

SEQ ID NO: 1959 - DNA, 1435 bp, Listeria monocytogenes-4B
  misc-feature (1)..(end): n can be any nucleotide a,g,c or t/u
ttggtcaaatcaatgtgcatgtcattatggaaaaactaggcggtggcggacatttatcgaatgcagccacacagcttaaagatgttacaattgcagaagcagaaaaacaattaattagcgccattgatgcgtattggaagggagaaacataattatgaaagttattttcttgaaagacgtaaaaggtaaaggtaaaaaaggtgaaactaaaaatgttgctgatggttatgcaaacaattttttaattaaaaatggttacgcagttgaggctaataatgcggctttaagcactctttcagcgcaaaagaaaaaagaagataaattagctgctgaagaactagctgaagcaaaagctttgaaagaaaaaatggaaaatttaacagtggaattaaaagcgaagtctggtgaaggcggcagattgtttggttctattacatctaaacaaattgctcaaacgcttgaaaaaacacatggtattaaaatagataaacgtaaaatggatctaccagaggcaattcgagctttagggcatacgaaggtgccggtgaagttgcaccatgaagtaacggcaacacttgatgtacatgtgagtgaagaataatttttcttaagggagcgtaagacagtggataataatttccaggacagaacaccaccacaaaatattgaagccgaacaagctgtactgggcgcgatatttcttgagccgaatgcgctgattaccgcttctgaaattttaatgccggatgatttttatcgaactggtcaccaaatcattttcgaaacgatgcttgatttgaacgaccacgggaaggctgcccatgttccaacagtatatgaggcgcttgctgccaagggtaatttagaagatgcggtcggtgtgccttatttgacggaattatccggtgctgtaccgactncgactaacttgaaatactatgcccatattatcgaggacaaggcgcttttaagacgtttaattagaactgctacccaaattgcaacagatggatattcgcgcgaagacgagctcgatatgcttatggacgaagcggaaaagagtatcttggaagtttcgcaacgtaaaaatgttggtgcattcaagaatattaaagatgtcctagttaaaacttatgatgatattgaaattttgcataatcgcaaaggtgatattactgggattccaactggatttaacgagctggataaaatgacagctggatttcagcggaatgatttaattattgttgccgcgcgtccttctgttggtaaaacagcattcgccctaaacattgcgcaaaatgttgcaacgaaaaccgacgagaatgtggccatttttagtttggaaatgggtgcggaacaacttgttatgcggatgctttgtgcggaaggaaatattaatgcgcagaatttacggacgggtgctttaacgagc

SEQ ID NO: 1960 - DNA, 954 bp, Listeria monocytogenes-4B
  misc-feature (1)..(end): n can be any nucleotide a,g,c or t/u
acggctgctccgatgtttgcccatccaagtgcgatcatttgtagagttccgccaaggatgatacatgctgttaagttacctgttacgagaccaattaatgtacatgcgattaatggctgatggaactgaaattcatctagaattccttcaatacctgctaaaaatgcaataagtactactaaaattattgatatgacagacataataaacctcctattttaattttttattgtgtctttagttcgtgttttgcttttttgatgatgtcttccatgtttgcgcttgagtcattagggactttacgcacatcgaatttaacgcctttttcttttagtttctcaaaggtttcaacatcatctttccccatggaaagtactttgctaacaacaactttacctacagagtgagccatggaaccaacgtttacttgttcgatttctacgccaccttcaattgcgcgtaaaacatcttgaggattttcgaataataaaagtgcttttgtattgccgaaacgcggatcttttgaaatctcaatcattttttggactgggataacgttagcttttactcctggtggtgctgcttgttcgatcaattttttacgaaggtcgtctttcgcacctgcatctgacctgaagataattcttgtggggtgtgttgcttttgcccatgcagtggctacttgaccatgcaagagacgtgcatcaacgcgagttaaaacgaattcgatttttccatctccaaccgcagcgatttccgcttgtggctgttcagtacagtgttactccccgactgtagttcctctggtttaacctgtacaccttcttgagctggtgcaagaatatgtgatacgatctagtgtgcgcttctttccgagcacactgtcggccgtgtactagtcggatcagcgnccggtaccagtgatcggcgagcnctnnnnaaaaaggttaagcc

SEQ ID NO: 1961 - DNA, 994 bp, Listeria monocytogenes-4B
aataggagacattaaaccgataattttcatttgtttcttttgttctggtgaataaccaatcatggaaacaaagtattgtgctaagtagacaagcccggcgataattgccagcaccatatccggtgaacctaagttaaaccataagaatgtgtggctagcaatttcggattatccgcgaatagcataatagaaagccatcaatattggcatttgaataagtaatggtaaacaacccatttgcattggattgatattatacttggaatagacggccatcatttctttttgaatagtggcttgttcttctttcgatgttgcacgttttagtcgagcttgaatttcatcaatttctggtttggcaacggccattttggattgcattcccatttgagctttagcagtacgcaagtttagtggcataattagtgcacggataagtaacgttgtaataataatcgcaattccgtaattacccccaacaaactttgcaacgaacataataaaactagtaaatggttggattaaataagtgctgaaaaaaccatctgtattttgtgaagggtccatactacaacctgtaagtaatagtaaagcaccaagtaaaacgctaattaaaataatatttttctttttcaatgtttcattttcctcctaaatagtaaaataatcaattcatacgttggaaaatgaaaaactgtcttcatcatcagtaatggcgctacatttcctggttatagccagccaattaataacaaaattaggcgtagttatataaatttgagctcgaagtgaaatttttactagctttaagcagatagcgtcagcgggtagcaccattttcggttttaataatgtaatggccgaccaataactgaaaatcgtcaacattaataaaaacgttactgtgagtgaaatgaattctggttcaagtacaatttgtaaaatggaaatcatgccacgcagtcgctcctttcaaggttttagtactcattaa

SEQ ID NO: 1962 - DNA, 1501 bp, Listeria monocytogenes-4B
agccagtacattaaaagcaatgaacaaatcttagagcaactagaagaaaaaggaaaacaggccaaaaaaatgtacgatgacacacgaaaaaaatggcaacagcttgaaaataaaagagaagaacaaacattacgcgatttaaaaatggtgctattaaagtaaaagggaggaaaacgcatgctaatcccagataatttgctacaaccactcgtcggaaaaaaacaggtcgaaccaaaagaatcgttagcagaagaattagtagaactaccttttatttcacttttaatggaaaatagccctgcgccgctcttaaagggagaagcggataacggagaacaagctacgctaccactaaaagaaatcgcccaaccactcgtttcagccaagctactcgacgatgcaccagaaacgaaactgcaagtagcaccactcgaactcaaagaagtgaaagaaacacttgcggcaatcgccaaacaagcaattgatcaacccaaaatagaaaacgccccgcaagctgtagaaactccagtaacaaatacaccgaaagaacccacaaaaaatgccagtagggagcaacaaccgccaccagaacttatcatacctacaaaagaatcacctaaactagcagaaaacgtggccaaaaaccaaccagtcctagccaaattacctcaagaaaaagaagtcgtgcaacttttcaaagcgagcattaaagagccagtaactgccaaggaagaagttgccgtcaaaaagcccgcagaatccagcaatatttggcatgatacggcgaaacaactcacgccagctgccaaacctgaagtcccagtgacgttaaaacaacttgataaaaccatcaccgaccaaatcgaacagctacaaaaattccaagtgaaacaaaataaagcctttttcgccatccagccggagtcactcggaaaagtcgaagttttacttaaaaaaatgcccgataaaatatttgtacatatcgaatatcaggaacaaacggcgaaacaaaaactcgaacagatggcgcaagatttgcataatcgtttccgagatcgcggcgtagaagttgccgtgacaatgacagaaaaacaagcaccgaaagagaataaccaaggctcggatggtcgacaccaaggtgaatccaaaaaagaaaaagaacgcgaaaatccacatcaggaaagagctaaacaagaagcatttgatttagaggaggagacgtaatttggacggaattagtagtttatcaggagccggtcaggatacaaataatgtagtaacatccagggtatccaaaacccttgtcaaagatgacttcatgaaactatttttaacaagtttgcaataccaagacccatcgagcccgcttgatacgaatgaaatgatgtcgcaaatggcgcaactttccttaatggaacaagttgccaatatgaccactgccgtagataagctttctgaacaagcgcaaaactccgccttgcaatccgcggttaatttcatc

SEQ ID NO: 1963 - DNA, 2126 bp, Listeria monocytogenes-4B
gctgtagaagattatgccttaccacttggactcaaagtttcaagtaaggaagaaaattcaaatacagttgaaaaaggacaagttatttcgcagtccccatcagctggaactgcaatgaatcctggtgatacaatcgagattgtcatttctgcaggaccaaaagaaaaacaagtcaaagaagtaactaaaacatttaacatcccatatacaccaagtgatgaagaaaacccacaaccacagaaaattcaaatctacattcaagataaagaccatagcatgactagcgcttaccgagaaatgagcattacacaaaatacctcggtagaaataacttttcaaattgaagaaggttctagcgcaggctacaaaattatcagtgatgataaagtaatcgatgaaggtacagtcccttatccaaattaaaaatagaacggaggaaatgtgctggaaggacaaattatcaaagcgttgagcggattttactatgtattttcggaaggaaaagtatatcaatgtcgagcaagagggaattttagaaaacgaaatatttctccacttgtaggcgatgatgtagaatttcaaatagaaaataaaacagatggttacattttagatgtaatgtcccgggagaatgcccttgtgcggcctcccgtggcaaacattgatattgcaattttggtgttttcggcagtagagccggatttttccacgaatcttgcggatcgttttttagtagctattgagaaggaagatatcaagccagttatttgcattagtaaaatggacttagaatcagaatctgaaaaagaacagattgctgtttacaaagacatttacgaagcgattggttatgatgtttttgttaccaatgatgaaccggataaagaagccattaaagactatattagtgggaaaactgcagttatcgctgggcaatctggtgtaggaaagtcgactctcctaaatagcttaaatagtgatttaactttaaaaacagcagaaatttcgaacgcactcggtcgcggaaaacatacaacgagacacgtcgaactaatgccgattggcgatggatttgtcgctgatacgcctggctttagttcaatcgaatgggatgacttgcaacctgaaacattacaattttgttttccggaaatggaagatcgtcgtagtggctgtaaattccgaggttgcatgcatgacaatgagccgaattgcgctgtaaaaacagctgttgaagcaaatgaaatagcagaatttcgctacaaacactatatccaaattttacaagaattaaaaaacagaaagccgaggtattaagaatgggaaaaatagctccttcgattttaagtgcagactttgcaaatcttgcaagagatattaaagaagtagaaaattgcggtgcagactacattcatattgacgttatggacggacatttcgttccaatattacatttggtcctgctgttgttcaagccattcgcccagaaacaaaactaccacttgatgttcatttaatgattgaaaacccggatacatacattccagaatttgcaaaagcgggagcagactacatgacggcgcgtgtcgaaacttgttttcatctctatcgcacattacacttaatgcgctcttacggggtgaaagctggcgcagtgcttagtccagccacaccgatcgatgattaacaacgcgttttaaaagaactggatatggccctatttatgacagttaatcctggatatggcgggaaaaatccattcgggaagaactataaaagactaatgccgtgaagaaactaggggacgaaaaaggcctcaatctggaagttgaagtaaatggcggcgtggatcatgaaacagcataattatgccgtgatgctggcacacatgtgtttgtgggtgctcgttacatgcatggaaataaaaatcggcagacaccaagttgtctattacgtgccatctggcgcgagtaaactaatagtacggctgggacctcagctccagccttatttggtaaggaagaagggcactcaagtatgaaaatactaatatcattgctggcggacccgcgtccgaaactcctgtttagcacatataccgccgctgagattagtggatcgcttac

SEQ ID NO: 1964 - DNA, 1501 bp, Listeria monocytogenes-4B
tgaaccgggtaaatgctttattcttgcaagcgattggcggcacgagcgataaagacaatatgtcgcaatcagccgaagaaatcaaaggtttactggatgttcttatttctgtcgctaactcagaagacgatggcagatatgtttttagtggttctagcacgagcgtgaagccatttacaacagataaaaccactggagaaatcatctataacggaacaacagaaaataaaaaattccgcgtaacggacacattagaagtagaagttttccatgatggtagtgcgatgacggatgtttttaacaacattcaaaaaatcgttgacgcaatgaaaactggcgataaagatgctttgtctgccttgcaagaaacaaacagcaagaatattgaaatcatcaccaattcgatgacaaatatcggcggacagaaaaacggtgtagcagcctatgataacgtactttctagcaaaattgtcgacttttccgaacgtaaatccaatgtcgaagaagtcaatatgccagaagctgtaagtaatctaaataaaacatcgattgcataccaagccgcactacaatccagggtgatggtacaaaaattaaccattctaaattatatgtgaggtgagaccaagtgggaagttcgattgcaagcagcttaatggacctgacgccttactattcgcgattcatcagccttcaaaaagctagttcggaaaaagcgaatacgccttatcaaaaccaaatctgcagctgccaatcactcgttgatcttacgctatttgaaaaatgctttatctgagtcgctgaaaacgatgagctctttcacgacttatgaaagtaaaaccaaacttgcgacttcatccaacgaaacgagttttactgtttcatcaacgagcagttccgtcaacggcagttattctatcgaagtccaaaacttggcgactgcagacacatacaacaaagcagtacctgatattgaggcaaaaatcggtgtaagcgggacaatcaaaatcaatggcaaagaaattaaagttgatgcagatagctcaatgaaaaatgtgatgaactccatcaatagcgctggagctaaggtgaatatctacacgctaggcgaaaacatggtcgtaacttcttcaacaaccggtgtcgaaaacagtattaaatttgaaggcgattcggctgttctcgatgcacttggtttagtacaaaattccccagaccatttagctgcagaggacgccaaactcagaatcaacggagcgaccgttacaagtgcaacaaacaaggtaaccaactacatcccaggcgtgaccatcaacctcaaaaaagaaacaactggcgctgaaaaattaaccatccaagaccaaagcgatgaaaaagcagccagcatgatcaccagttttgtgaatgcatacaatgcactaacaagcacaatgaaaacctgcacggggaaaggaaccattgtacaagcatatgctgccgacctggaaacagatgaagccct

SEQ ID NO: 1965 - DNA, 1253 bp, Listeria monocytogenes-4B
tactaccggatgttacggcgcgatttattatacaccggagtaacgcgaagtaaacaatttctcattctttgcggggaagaagaagcttttcgaatggggatagaacgaattgatgaaaataaacgtaatacaacactctctgaacgtttaatgagcgaagatgttttattagaacaaatgacaaataaacgaattctcacagctgaaaatattacggaaattgatccgatgattggaatggaagggattactccagaacaatttatggcaggataaaaaagaaccactctctaaaaaaatagaaagtggttctttttttattgttcgttatcttggaaaaaaggaaggcgaatagtaaatgaagtacctttatttggttcactagtcactgtaattgatccatcgtgatattcaattaactgcttcacaatggataagccaataccagattcgccaaaagcggtatttgttcgagacatatctgctttataaaacctttcccaaatttgttctaattcctctgtattcataccaatcccagtatctgttatcgttaaaacagattctttataatcttgtgtgccagttagagtaatctgaccattttcagtaaattggacactatttttgacgatattgataaatacttgtgttaaacgatcgtaatctgcgtaaatcgccatgtctttatcgatagaaacagtaatagtgttacctttttcgcttgatacataatcaagttgttctttgattaactcaaggaattccttaccattaaaacgtgttttttgaagtttaattttgttactgcggattttttcataatctaaattttcattgactagtttcgttaaacgtctagcttctgtatcaatgagtgctatgcaacgatctgtttcactttttggaataatatcatttactaaaccttccgtgaggccactaatcgttgtgagcggggtacgcatttcatgagaaacatcagcaataaactggcgtctccgcttctcttgtcgttctatttcttcttgagatgtttcaagggtttgtgtcattttattgaaatcaatggcaagtgcaccaatttcatcaaaattattttccttcaatcgagctttgtaattgccttgaataacgtcttttgtcgctgctcgtaagtttgttgattcgatttacttgtagtttggacaagattgcgctaagaataagtgctaccgttatagaaatttaaatagtgtagaacatatagcggt

SEQ ID NO: 1966 - DNA, 2670 bp, Listeria monocytogenes-4B
cgacatgtcctggaaagttagctcgttagatgtacctgtttttggtaatttaagggagatgttagaagaaataaaaccggattgtgtcgttgattttacgacccctaaagtagggtatagtaacacgaaaacgattttagaacacggcgtacgtgcggtcgttggtacaacaggttttacaccagaacaaattagtgaactaagatcaattgcagaatcgaaaaaaatcggtgcgttaattgcgccaaactttgctgtaggcgctgttttaatgatgcaatttgcacaaaaagcagctaagtatttcccgaacgtcgaaattattgagttgcaccatgacaataaattagacgcgccaagtggtacggctgttaaaactgcggaaatgatgacagaaacgcgtgaattcgttaaacaaggtgctgcagatgaagtagaacttattgaaggagctagaggcgcagaatatgaaggtatgcgaattcatagtgtgcgtttaccaggacttgtagcacatcaagaagtgatttttggagcagagggacaaggattaacaattcgccatgactcttatgaccgaatttcctttatgtctggcgtggcactttctgtacgtaaaacaaaagaacttgaaacacttatttatggcttagaaaatattttagactaaggataggtgaatgagatgcatatcgcattaatcgcgcacgatgaaaagaaagatttgatggttggatttgcaactgcatataaacatttgctcgaaccgcatcaattatatgcaaccgggacgacaggtttacgcattatcgaagcaactggcttaacggtacatcgttttaaatcaggcccgcttggtggcgatcaacaaattggtgcgcggatttcagaaaataaaatggacttagttattttcttgcgggatccactcactgcgcagcctcacgaaccagatgtgacggcgcttattcgattatgcgatgtatacgaaattcctttagcgacaaatattggcacagcagaaattttaattcgtggtttaggagctggtttcctagattggcgagacttaagacggaatgatgaataaaggagcgatgacagatgaatgacgttttcctaaaagcgcttcctgtattgcaaaaattaactacagcgggttttgaagcgtattttgttggcggatctgtcagagattacttgctaaatagaacgatttccgatgtggatattgcaactagtgctttcccagaagaagtaaaagagatttttcagacaagttatgacactgggattgcacatgggactgttacaggttagagaaaataatgaattttatgaagtgaccacttttcgaacggaaggcacgtatgaagatttcaggcgcccaagcgaggtaacctttattcgctccctagaagaggatttaaaacgtcgcgattttacgatgaacgccattgcgatggatgaacattttgcgctacaagacccgttttctgggcaactagcgattcaaaataaagaaatcaaagcagttggtaaagcctccgaacgttttcatgaagatgcgcttagaatgatgcgagcagtccgctttctgagtcaacttgactttgagcttgataaagaaaccgaaaaagctttagaaagccaaatagagttgttacagcatacttccgttgaacgaattacggttgaatggctaaaaatgatgaaaggcaaagcagcaaaacgtgcgatagaactacttttaaaagtcaaaatggaaacttatttaccaggcttaaaagacgagaaatcagcactaagcgagtttgctagttgggactgggaaaaacgaacaaccgaagaatcgatttggcttggactcgtcgttgctgtcaaacctaacaatgttaacgcatttcttaaagcttggaaattacccaataaaacaattcaacttgtgaataaagcatatcaatacgcgctaaacatgaaagagacatggctaacagaagaactttatcatgctggcaaggcagttttctcattagtaaatgaactaaatgttattcgagggcaagaaaacaaccaacataaagtaagtcaagcatacgaggcgttaccaattcactccaaaaaagacttagctattactggagctgatttattaaaatggtctggagaaagcgcaggtccatgggtaaaagagacgcttgataaagtggaatgtggtgtcctttccaatgaaataaacaatgaaaaaattcagattaaaaggtggctaggctatcatgaagaataatcgagaaaaattacttgctttatttacagaaagtgatggtacttatttatcagggcaagaaattgcggatagtctaggatgctcgcgcacagccgtttggaagcaaatggaagctctccgtaaagaaggatttgaaatcgaagcagtcagaaaccgtggttaccgtttgtcagcaacagcagaacagtacacgaaagatgcactactactcggtttagaaaccaaatttatcggtcagcatttggaaatccatgaatcggttagctctacacaaatcatcgcccatcagcaaatcggattctagccctgaaggaaccgttatcgtagccgatgagcaaacagctggaaaaggtcgcttgcttcgcccttggagttccaaaaag

SEQ ID NO: 1967 - DNA, 1944 bp, Listeria monocytogenes-4B
tttttgtttgtgtatgataataggtgggggaggacaaggggaggggcaccgacaacgtcgagcaagacgacagcggggggggcaacgcgacaggaccagcaagacacaagcaggacgccagttgcgagacgatccagtacgagccgcaaaggaccgcacgagcgtagcatgaaacgcacacctaagaaatgaagaattgcacactgcacaatgtcaacgacgaaagggtggaccgcaaatggcttctaaaacaaagaaggctattatccacgtaaagaaacaatttgaggctgttcataaacaatttgaattagttcaaattttgaatgaaaaaggagaaatcgttaatccagatttaatgccggatttaactgatgacgagttagtagaattaatgactcgcatggtttggactcgtgtacttgaccaacgttctatctcacttaaccgtcaaggacgtctaggtttctacgctccaactgctggacaagaagcttcccaacttgcaagccactacgcacttgaaaaacatgactatattcttccgggttaccgtgatgtgccacaacttatctggcacggacttccacttacaaaagcgttcttgttctctcgtggacactttgtaggtaaccaattccctgaagatttaaatgtattatcaccacaaatcatcatcggtgcacaaatcgtgcaagctgccggtgttgctctaggacttaaaaaacgtaaaaaagatgctgttgtaatcacttatacaggtgatggtggttcttcccaaggtgacttctatgaaggaatgaactttgcaggtgcttaccatgctccagcaatcttcgtagtacaaaataacaaattcgcgatttctacacctcgtgaaaaacaatcagctgctgaaacattagctcaaaaagcagttgcagccggaatcccaggcgtacaagtagacggaatggatccacttgcagtatatgctgtaactaaattcgctcgtgaacgtgcagttgctggtgaaggcccaacattaatcgaaacaatgacttaccgttatggtccacatacactttctggtgatgatccaactcgttaccgtacaaaagaacttgacggagaatgggaacttaaagacccaatcgttcgcttccgtactttcttagaaggtaaaggcctttggaacgaagaaaaagaaaatgctgttatcgatcaagcaaaagaagaaatcaaagtagcaattaaagaagcagatgctacaccaaaacaaactgtaactgatcttcttaaaaatatgtacgaaacaccaactgctcctatcaaagagcaactggcaatctatgaagcgaaggagtcgaaataatcatggcgcaaaaaacaatgattcaagcgattacagatgcgcttgcagtagaacttgaaaaagacgaaaacgtattagtttttggggaagacgttggtaaaaacggcggcgtattccgtgcaacagaaggattacaagaaaaatttggcgaagatcgtgtattcgatactcctctagcagaatctggtatcggtggtcttgcgattggtcttgcacttgaaggtttccgtccagttccagaaattcaattcttcggtttcgtatttgaagtaatggactccgttgctggtcaaatggctcgtatgcgttatcgtacaggcggaactcgtactgctccaattacaattcgcgcaccttttggtggtggagttcatacaccagaaatgcatgcggataacttagaaggattaatggctcaatcacctggtttaaaagtggtaattccatccactccatatgatgcaaaaggtcttttaatctcagctattcgtgataacgatccagttatcttcttagacatatgaaatataccgttctttccgtgaagagttccagaaggcgaatacacagtagaaattggtgaagcagct

SEQ ID NO: 1968 - DNA, 2129 bp, Listeria monocytogenes-4B
  misc-feature (1)..(end): n can be any nucleotide a,g,c or t/u
cacagtgcgctggaaagttcattattgataatatcaatcgtttcctcccataataaaatcatttttttgaattgttgatagattttttcgccctctttagttggttccacaccattcgagtgccggaagaaaagttgagtttggaactgtttttcgatattttttattttattggacatattagactgtatattatgcagttcgttcgctgctgcagaaatactctttagttcagctactttattaaatgctttcatgttttcaatatccataattttctccttttggtatcaaaaataatgataccggcatatgattttcgcatttcaaatgatagcgcagatagattatactttatttacaatataaattcaatttgggggttatgttatgaatacaaccattcaacaattggttaaacatgtttcagtaagagaatttaaaaatgaaagattatcagatgaaatcaaacaacatttattaacagctgcgagaagtgcatctagttcgcattttgtacaatctttttctattttagaaatcacagatgaaaaactaagaaaggaactagctgaaattacaaatagtgcttcttatgtaaatcaaacggggaccttttatgtgtttgtaggggatttataccgacaatcaaaacttttactggagaataatagaactttagatgggttgagaaatatggaatcattactcgtctcggtgatagatgctacaattgcagctcaaaatatggttattgctgctgagtctcttgatttaggaatctgttatatcggtggaataagaaatgatattgaaaaagtagctgaattgctaaacttaccaccatttacgatacctgttttcggattaactgtaggcgttccagaatataaaaatcaagtaaaaccacggctattactagaaaatcaagtaggagaaaatcaatatccacatgaacaatttacggatttaaaagcgtatgaggaattgaccaaagattattatgctttacgtgaaaaaaatcagcatcaaacttcatggggagacaagaatgtagcgttttttgaagaaatacgaagaccagaaatagctggctttttgaaaaaacaagggtttacattggattaattaattttcgttgtagggcgtataaaaaataatagtattaaatttatgagaggctggaagagtattttttccggctttttatttgattggggctattattttgtcatagaaagcttaaactagattagatggggatagatttgtataattaatatggagttaaaattacactaatatatccaaaataaatttcataaaaggaggatccaaatgaaatttctaaaaaaatacggtttttactttttattactcggcgttttgagtgattttctaacgccttacatacttgggattttttacccagaattaaatcaaatgacgcgggttatgagtgtgtttggggatgtggctagtccggtgcggggagcgtttttggtttggtcggtggtgtctggggtgttctttgtgctcgctttgccggcgatttatcagagcgttgttaaaacttcgcggactttggcgattttgcttgcttctgcgattggtttgtatgggattggcgattgtatttttaccgggttgtttagtattgacacggagcaggcgagttggacattttcgacttgggtgcataatattggctcggggctcggttatgcgggatttttgatttttccgttgtttctggtcattctttaccggaaaactggcgataaaacccgcagcaatatctatctagttttactcattgttagtttgctgtcggctggtgtttatgggcttgcgcggattcctgctgtgaatgacttgccggttttagataaaattggtttttgtcagcggattagtttcttttttaattacttaccgattgttgtttttggaattgatcggattagaaaaccctagattttttaggaatctagggttttttgttcgcaaagttcgataaagtgctggaagtcttctcgttttgcaagttttttgncgcctttccagcacaatgcngcgtttctctggtaaaaaagancagtnactacagccctcccccaagntaacac

SEQ ID NO: 1969 - DNA, 963 bp, Listeria monocytogenes-4B
cctagatgcattagagcatgtttgacggccgacgtgtgctggaaagacaaaggcaattgatttgttcgatgttactgctcccgcgaaagatgatttgcctgcctttgcgaaaattaaaattccttatttgctgattggcatcacgacagatcaacttttccgaattcttgatttgcgccgcggttacgagcttttaaaagaatgggatgtgcctgttacttattatgttttggcctgtgtttacggccatgacgcttttctagtttttttttttttcccgaaattcgaaccgctcattcggtcatttttaagtaatttacctgttaaaagcatataaaaaagagacctcggaaaatttccggggtctcctttaattagtctttataaattgatttcgttcggttaagccaagcatagccgagtccgataacaaggcctccacctacaaaattcccaagtaaagcaagtactaaattgacggtcacattgcccgctgtcattgcagcaagtgttccaccagaagcgaaaaatgctaatgagaaagaggagaagttggcgataacgtgctcaaatcctaagaatgcaaagatgaaaataatgaaaatcatcgcaatgactttaccagcatcatctttcattcgaagtgtacaaagcacggccgtatttacaacaatattggcgaaaataccttctacaaaaatttgtagtggcgctttttcaagcttaccgctaacagcagtaaataagaaatggtcagcaggtaaattatggaaaacggatgttagggaaactaagtacccggcaagaattccacccaataaattacaaacaatacataaaagcaaaatttgtaatgcttttcctggtttaacaattttttgataaacaccagttgtcatatacatcatgttagaagtaccaagctctaacattcatataaataatcataacgagcgaccaact

SEQ ID NO: 1970 - DNA, 2483 bp, Listeria monocytogenes-4B
caattttctccttctgccggagttcccaccactgccgaagctgtatcatgtgttgccactgtcactacatcacaattaggaatatcatactcctctagccactcctcttttactttacctaaatacgtacctgcatccgtcagtggcgcaaatttttccacatcaatgttcaaatgcgaaagtaaatccttatcaaataattgttctcgcaagttaagcatttgtgtagtcgatgaatttgttgtttctgccaccttaacccccgtgagaacataaccaatatagtcaggaatcaacaaaattttctccgctcgttctagtaaatctcgctcttccacgtacagctgatatagagtatttaattccataaactgaatacctgtttttttataaatatattctcgtggatactcactcgttaaattctgcaccgcatttaaagttcgtttatcgcggtaactaattggatctgccaacttctcaccggaagcccctatcaaaacatagtcaacgccccacgtgtcaataccaagcacacattccgaaattcctagttgctttactttttccaagccaataaagatttcctgcatcagttgatcaatttcccagcgttcgtgcccatctcggtacgtaaaaccatttttaaaacggtgaatttcttctaattgtaatttttcattcaccaatttccctagaattaatcgaccacttgatgcaccaatatctactgcaacataatgtttcactggtctagctccttttctttaatcaattgtatttccgtaacgttccttcgtaatatcatcaagtgatctgccacgtgttttcggcgcccaaattacaccgattaaaagcgacactgtaagtaaaccaatcataattgtccccgccacagtaaagccaagatttgccaagattactgggaacacaatcgaccagacacctgtactaccacgaactaagaaaaacatcacgccttgaaccccaccacgatattttgttggaaaaagttctgttgaccaaagtgcgtaaaaagcttgtgcaccaatccctgctgaaataccccataaaataacaaatgtccataagccaacccaagacattcaaacaaaagtaagtacaacccaagaagcaactgccattaaagcccctacaaaaaacaatccacgatgacttactcgatcaccaaatttagcaaagccaaagtatgtagaagctgctgtgagtatccataatacagcttgcaataaattcgcttgtgtattagaaagaccacccaccgtttcatatacaaacggcataaagaatcccattgcacccgctactaaattccaaaataagtacacacccactaagaaaagtactgattttacatttaccatactagaaaatgctgttttaaaagggtgttccaaacgattaccactttctttcattttcacttgctccgcttcccagtccttcgactcctctaatttacgttgtaactgccaagcaacaaacgctacaatcaataaagataagaaaagtaagcggttacctaaaagtccaagtggagatacaataattcctaaagtaaagataattgctggcccacatgaccaagcaaattgagatataccaatatttctagctcttatactaggatccgccatttcagaaatatatgtgcatgaagccggaacctcagtctcaacagaaagacctgtaactaaaaagccaattaatggcaggtgggaaattcattgcaaacataatgattgtaaccccaagcatatacaccaacatgttatacgtataaataaatttccgtccatatttatctgctaaatgaccaccaataagtgcgccaattgcagaaccaaacgcattcgcgctcacagccccaagtaatcccaccgcaaaactgctaagtccgaattgtgttgcccacaaagttagtccacttgctcccgctgcaatacatccagaatctaaatagttcgtcaaagataccgctatcgttccttttttacttgtactcgatccagccattcttttaaccctcctacttattttagttaagcgcttactttatattaaacaattaatgattgcgctttacaatatcctgtgtttataattaaagtatcaaatttacagaaggagattgtgaaatggaagcgcttaataaaaaattatttcgtctaaacttccaagaaaaaatccatacaagcactggcacttttgttcccgatttacccactggatcctttctaaaagagaacggccgcctggcatttttcaatgattattccttgcgccaccacgacatttgtttctggcccacccacccgattcgccgaccttgcttcttcttcccaccgctcctcttggctcacttgcctcgctcctggacgctccgcccccgcccttgcccggagttccgacccttcgcgcgaccgccaacccccacctaaaaaacgccggctagcccccta

SEQ ID NO: 1971 - DNA, 1725 bp, Listeria monocytogenes-4B
  misc-feature (1)..(end): n can be any nucleotide a,g,c or t/u
aagggcaagaactgaaagcgccagtgtgtggatacaaaagattaccatatccaagacaactatactacaacagcagcaaccattccgggctattctttagttgcaacacctgctaatcagaacggaacttttggagctgggaatgtcacggttaattatgtatacaaaaaagacgattatacgctcacttccacttacaaagatacgaacggtcaggaactaaaagcaccagtggtagatgcgacaacgtatcattatcaagacacgtatacaacaacagccgcagttttcccaggttatacgttagtagcaacaccaaccaacgctactgggacatttggttcgtcaaacatcactgttcattacgtatatcaagcaaacggctatcaattaacttctacatttaaagatcaacaagggaagacgatctcaccagatgatgtcgatactaaaacctatcacgtgaacgatccctatacaacaactgccaaaacgatcccaggctacacattagtgacgacccctacaaacaaccaaggtaattttggaacaagcgatattacggttgattacgtttataaagcagaagattatacattaacttcgacgtacaaagatgcgcaaggtaaagaattaaaacaacccgttgtagatagtaaaaaatatcatattcaagacaactattctacaagtgcagcaaccattccgggttatacgctagtatcgacacctgcgaacgaaacaggaaccttccatacgagcgatgtcacggttaattatgtgtataaattaacagacttaaaattaacttcgacatataaagatgcgcaaggaacggagttaaaaccgcccgttgtagatagcaaaacgtatcatattcaagataactatgctacaactgcagctgtcattcctggctatacattagtcgcaacaccagcgaaccaatcaggtacttttggtagcacggatatccaagtgaactatgtgtatcaagcagttgcttataaactaacttcgacgtataaagatcaacaagggaatgatttagctttaccaaaagtagattcgaaaacgtaccatattcaggatggttacacgacgagtgatattgctattccaggttatacattagtcgcggctccaacgaatcaaacaggtacatttggcgcgagtgatgtaaccgtgaattatgtctacaaagccaatgactacacactaacttcaacatataaagatgcgcaaggtaaggaattaaaaacgccagtcatagacagtcaaaaatatcacattaacgacacttatactacgacaggagctactattccaggttatacattagtcgcagcaccagcgaatcaatcaggtacatttggcgcggcgaatgtaacagtcaactatgtatacaaagcagatgattacacattaacttcgacctacaaagatgcaaacggcaaagaattaaaagcgccagtcgtagacagcaaaacttaccatacaaaagataactattctactagcgcagnaaccattccaggctacacactagtggcagtaccagcaaatcaaacaggcatatttaatacgagcaatgtgacagtcaattatgtctacaaagcgaatgaatataccttaacttacactttgaaaaatgcgcaaggaacacaactcaaaccagctatcgcgaaaaaaggatccatcattcaggatggatatgcaactaaa

SEQ ID NO: 1972 - DNA, 1716 bp, Listeria monocytogenes-4B
ataattatgtgcgacttttagaatttcaatggttttcccactattcatggaaccataacggaaaaataattgtgccattaagaccgctccctttaactttataaactcttttcctattttatcatagagcggcacaaattgggacatatagttaaaaaaagctacgccgcataggggcatagcttgattttaacgaaaaacttctgcgccgctcccttcgacatcaagaagaagaacgtctgcatcgatttccagtgtttgtaaagatgtttgcagtgtgttagcgaggtttcttggagcgaacactaagacagttgggcccgcgccgctcaaacaagcagcataggctccttggctttttgcaacatcgcgaatttgtgttaagtgtggcactaattgactgcgatatttttcatgccataaatcacgttccatcatttcaccagctagcgccatatcattgcgtaaaattgctgcaatcattacattggcgatactgctcgcttggacagcttctttgaatggaagcgtatcaggcaaaacaccgcgactttccgaagtaagaagttctgcctttggaataaaagcaattaaagcacaatccggaaaaaggtggcgtacatagaaatcttctccatctaatttcgctcctacgacccagtttccaagaacagcaggcgcaacattatcgggatgcccttctatttcagcagctatccgaactttttcctcttttgaaagtttaagttcagcaagtgtattggctaattcaatccccgcaacaaccgctgcagaactactaccaagtccacgggctggcggtatatcacaggtcatcactaaatgatgcggcgttaaattaggcgccaggtttaaggccgtttcgataattacattggtttcatcatgtggaatcccgccgccaatattatgttcgatataccaagagtctgcttccgctccaatatcaagcgttaaatataacgttaacgctaaaccacacgaatcaaagccagggccaagattggccgttgttgccggtacacgaatacgcattaagctttcactcctgaacgtaaatgtgtgcgcattgcttcgatatcatccacatgagaaattggaatttcatgcacactcatcgcagtatccggatctttcaagccgtttccagtaaagacacaaactactgtttcgccttttttaattgttccatttgctacatgttggatgacaccagctaatgaagcggctgaacctggctcgataaagacaccatcttgtgctgcaatttttttatacgcatttacaatttcatcatctgttacagaatggatatatccgccagattcatcgcgagctgcttctgcaagctcccaactagctggatttccgatacgaatcgccgttgcaattgtttccggattatcaatcggtttaccttgaacaatcgcagccgcaccttccgcttcaaaaccatgcatccgtggaagtccagaagccttggcctcattccactctttaaaccctttccagtaggcagaaatgtttccggcattacctactgggattgcaaggacatctggagcagaacctaattgctcacaaatttcgaatgcagctgttttttgaccttctaaacgataaggatttaccgagtttacaagcgctttccagcacagttgcggccgctcagtcaggatctagttgccccaaaag

SEQ ID NO: 1973 - DNA, 1545 bp, Listeria monocytogenes-4B
gtgctggaaagccaaacaggtcaaggtaaaacagctgactccgataatgcacttgagaactcgctttacggcttgcctcaaggttctgcctttacaactaaagggcaaaacacttatgaatctgcatctgctattttaggccaacaaggctatacaagtgctgtattccacggtaactataagagcttctggaatcgtgatgaaatttataaacaatttggttacgataatttctttgatgctagttactacgatatgaacgaagcagatgtttctaactacggacttaaagataaaccattctttaaggaatccgaagaatatctatcgtcattacaacaaccgttctacacgaaatttattacgcttacgaaccacttcccttatccaattgatgagaaagatgcttcgattgctccggcaacaacaggcgattcatctgtagatacgtatttccaaacagctcgttatttagacgaatctgtgaagagctttgttgattacttgaagaaatctggtctttacgataactctgtcattatcatgtacggtgaccattatggtatttccgacaaccatgaagaagcaatgacaaaaattcttggtaaagattacaacacttttgaaaatgcccaagcgcagcgtgttcctttaatgattcacgttcctggtgttcaaggtggcgttcaagaacaatacggtggtcaagttgacttacttccgacattacttcacttacttggtgttgataataaagagtacttgcaatttggtacagatttactttctaaagaccataaacaacttgttccattccgaaatggtgattatataactcctacctattcaatgattggtggtaacatgtataatcaacaaactggggaaccaattgctacggaaacaaaagaaatgaaagaaacaaaagaaaaagtagcaaaagaattagagctttcagattctgtactacaaggtgacttgttacgtttctatgctcctgatggtttcaaaaaagtggatccaagtaaatacaattacaataagaaaaaatcaactgattcatccgataaatgagaaaaagagtccagaatatctggactcttttttacttacctaaacctctcataatatacgccaccgtatcatcaatttctttggcatcatcccactccacgtcgggcatcacgacaaatcttgttagcataaatccgacaatattcgtgataagagcgcgcataatcgtgctgttcggcatatcaacaatttccccgcgctctttataataatcaatcatttgatcaaattaacctttgacatgaggcataaaaatttctgaaaactgtattcttaactcatcgtgataaaacagttccataaagtaaattttgatgaccttaccattctctttggcaaaatcaaagcgattaacgatgatttcccgaatgaatgactgaaaatctggatactcactttcaaacacttctttgacaaagctttgtctttccagcacagttcgcccgccaagcagctctgatgactgaagtc

SEQ ID NO: 1974 - DNA, 2048 bp, Listeria monocytogenes-4B
  misc-feature (1)..(end): n can be any nucleotide a,g,c or t/u
actgcccgctgctggacggccgacgtgtgctggaaaggttggagcgacaaattcggttaatttttttatgatggctttgattattggacttatgagcgggatttctgtcgtagtagcgcagtattttgggtttaaagattttgatcgtttgaaagatgttattgcaacggcgacttatgcggtggttttttcggcgattattttaactgttgcaggagttttgctagcaaagccattgctaattttacttagaactccagcgaatattttggatgattctactatctttttaaccactctttttattgggattttaccgatgagtctgtataacggaatggccgcgatacttcgggcgcttggaaattcgattacaccgctgatttttttaattttatcgtccttaatgaatattgcacttgattttttatttgtcgtatatatggatatgggcgttcgcggggctgctattgcgacagttctttctcaaacagctgcagcaattgccgttatttactatgcttatcgccacgtaccatttatgcggatagagcgcgcaaaattcaagctttccaccccactacttaaagaaatggtgcgcattggactaccttctggattacaaggatcctttatttctatcggaaacatggctcttcaaagtttaataaatggatttggttcatcggtcgttgcggcatatacggcggcgagtcgaattgattcacttacatatcaaccaggaattgcttttggagcagcttcttcgaatgtttgctggtcagaacatcggtgctgggaaaattgaccgcgttcgcgaaggtttttggtcgggaattaaagtagttacagctatcagcattggaataacgattttagttcaacttttcgctcgggagtttttattactatttgttgattctagtgagacggaagttattaagagcggtgtaagttatttacttattgtctctttattttatgtcgaaaaaaaagttttatttgttgttcgagaaacactcaaaggcaccggagatgcgatggttcctttagctatggggatttttgagttagtttcgagactggttatcggatttgttttatcgctttatattggttacatagggctttggtgggctacaccagttgcgtggattacagctacgatgctcggcgtgtggagatataaatcaggagcatggcaaaaaaaggcagttattaggcgaaaataaccattttagtaaaaaaacgccagagaagctcatattttcttttttttaataaataatatccccccattagttttgctaaaaaaagctgaaaaacgaatatatgaaaatattctttgtattattggcaaaactttagtaaaatagaaggtagtgataaaaaaagattgggcgtgaaatttttggctgaaacagtaaagataaatagcgagttcgtaacgcttggtcaacttttacaaatgattgatgtagtttcaactggtggaatggcgaaagcgtaccttagtgaaaatacgatttacatcaacggagagcaagacaaccgccgggggaaaaagcttcgtaatggcgatgttatcttagttcccggtgttggaaaagtgaaaatcgagcaaggaaaataacagatgcatttagaaagtattgttttaagaaatttccggaattacgaaaacttagaactagaattttccccatctgttaatgtttttcttggtgagaatgcacaaggtaaaaccaaccttttagaagccgtattgatgcttgcacttgcaaagtcacatcggacaacgaatgataaagattttattatgtgggaaaaagaagaagccaagatggaagggcgaatagcaaagcacggacaatcagtgcctttagagcttgctatcacccaaaaaggtaagcgagctaaagtaaatcatttggaacaaaagaaacttagccaatatgtcggtaacttgaatgtggttatttttgccccagaagatttatcgcttgtgaagggcgctccaggaattagacgtcggttnttgaatatgg

SEQ ID NO: 1975 - DNA, 2630 bp, Listeria monocytogenes-4B
gggcatatcgaacttcaatcaggatccagaacgcagcgtgtcaatgtcgcagaaggttctgagaaaatcatgcaagccattatgtcacttccaaaactcgacaatgctagcggagaaccaggaacaaatatcggtggcatgctagaaaaagtgcgccaaacgatggctgggctaacagataaattaccagctgatatttttattcaagatttgctagctgtggatacatttgttccagtagacgttcaaggtgggcttgcaggtgagttttccatggaacaagcggttggtattgcctccatggtaaaaagtgatcacttacaaatggcagccatcgcctcagaaatcgaacaagaactgcaagtaagcgtcaaaattggtggtgcagaagcagaggctgccattctcggagcgcttactacaccgggaactaatactccacttgccattttagatttaggtgctggatccacagatgcctcgattatcaacggaaaaggagaaattatcgcaactcatttagctggcgctggcgatatggtaacgatgattatccagtcagaaattggccttgaagaccgttatttagccgaagatattaaaaaatatccgcttgctaaagttgaaagtattttccacattcggcatgaagatggcacagtgcaattttttgatacgccgctttctccaacagtttttgccaaagtggtgattgtaaaaccagatggctttgtgccaatacctggggatgtatcaattgaaaaaatcaagttaattcgccgttcagctaaggagcgtgtctttgtaacgaataccatccgcgctttaaaatatgtcagcccaactgggaatattcgagatattccatttgtcgtaattgttggaggatcagcccttgattttgagattccacaattaattaccgatgcactttctcattattcactcgttgcagaccgtgggaatattcgtggtaaagaaggccctagaaatgcagttgcaacaggcttaattctagctggaggtgctaaggcatgattccagttgttagtaagccagcaatttattttcatgcagatgtagacgcgaatccagacagtattaaacaagttttatttggaatagaagaagaaggcattccatgtgaattagaaattatgtctttgaaagacgaagtgcaagcagcatttcgagcatctgcgagttctccgcttctagtaggggttacgctgaaaaatgatcatttagtgattcattatcgtaatttacccccagataaaccactattttcagcgtatcgtttttgcgcaaccacactagaaaaccagcgaaatatgggaatgaatgcggcgcgacttgtcaagggtgtaccttttaaataaggaggtgaaggaatgcatcaagcaattggaatgattgaaattaaaggacttgcttcagcgataaccgtagcagatacaatggcaaaagtagctaatatccaacttgtagacacggaaaaagcaaaaggttttggctggattaccgtgaaagtggaaggtgatgttgctgctgtgaatgcggcgcttgaagcaggcgaacaaaccgcaatagcctcagacagttttattgcgaaaaaagtcattcctcgaccaggggaagagatttttacagtattttggccaaaagaagaaatagagccagaacagccggaagtaatggttgaaacagaaaaagtggaagaaaccgaagtcccggcagaagcgacttgcaatctatgtcatgacccgctttgcccacgagtaaaaggggatccaagacaagattgtatccattttgaagaagagaagtaaacccaatttgaggaggaaataataatgaataatgcacttggaatgattgaaactaaaggtcttgttggcgcaattgaagcagctgacgcaatggtaaaagcagcaaatgtatcactagtagggtatgaaaaaatcggttcaggtcttgtaactgttatggttcgcggtgatgttggtgcagtaaaagcagcaaccgatgcaggcgcagcagcagctcgtaacgttggcgaagtacaatctatccacgttatcccacgtccacacaatgatgtagaaacgttgctaccaaaaggtctataagccgtggaaagagaagaattaaaagcaataatcaagcaaatagtaacagataaacttagtggtgtggaaacagagattcctattggagtctctaaccgccacatccatctaacagaaaatgactataaccaactttctccaaacgaacctattcaagtgaaaaaatggctcaaacaaccaggtgaattcgccggtgaacaaacccttactgttgtttcagaaaaaggggaactgcatcctgtccgcattttaggaccacttcggattttttcgcaagtagagctttctaaaacggatgcaagaatgcttggtatgaagattccaatccgcgtttccggagatattgacgggacacctcgggatcaatttcgtttcgaaacatagcgaaatctgcttaccaaaaggagcgattgtcgcgaaacgcccatccatttaccatagagtgtggcgcatgactatggtgtgaaacaatgggatgaagcattccatactaccagg

SEQ ID NO: 1976 - DNA, 1608 bp, Listeria monocytogenes-4B
  misc-feature (1)..(end): n can be any nucleotide a,g,c or t/u
gcgtatcgaaaaaccgtcgcgatatgattaccgaagaattagaagttcttggcccaatcagactttctgacgtcgagcaagcccaacaagatatcgccaatgtcgttaaaaatctggaaaaagatggcaaaatagttatccaacggggggaacaggatgtccttatctaatccgcgaatcccaaaaggtaaagtcactttatccgacgtgaaaatggaactgttttatttggatgatatagaagaaacagaagaagtcgagtcaccctactcgaaagaacttgaacaactagaaagtcatcaaaaagaactggaaaaacacctatctgccatcgaaatcgaacagcaaaaattagctaacgaaaaagcagcacttcaagctgaacgccaagccattgaagaattaaaacgcgaagctgaaacagaaatcgaagcaaacaaacaagcttttgaaaaagaaaaaacacaaatgtatctaactatcaccgatttcctttgggatgaaagtatcgatcttgcagaaagaatcgtccaccaagcaatcgacacgcgccaaatcgaagtcttaccaatgctaactgaagtcattcaaaaactcccagttgctttcgacaaactaaacgtcaccacccatccagagaccttaaaagctctaaaagaagaaaacacaggcacaaaatacgactggcttttagaaaatatccattggaacttcgatatgcgactcgattacggcgaatttactgtagaagaagaaaaggaatacttcgactaccgcatcaccgaaattttccaaacacttcataaacaaaacgccgaacggaaaattctaggaggcgataaaccgtgaactggtcgccaaaaaccaaagcttggcaagaactaaaaaacaccgttccatacatccaaaaaggaaaaattcacacagtccaagaacaagtctatatttccaaaggccctcaagtgaaaattggtgacactgtcatggtcggtgaaaataaagtgctctgcgaagtaatttctattgaaaaagaaaacaacatgctactcccgtttaatcaaagcgacaaagtggcatacggtgattgggtgtacgtaacggatacgaaaattacaatcccggcagacgaatacctccttggaaaagtactcaacgcatccggcgatattttaaacgaagaagctggagtggctaaatttaaacaaaaaatgccgcttgaagctccaccaattcatgcttttagtcgagcagaaatcactgatacgctcgaaacaggcatcaaagcaattgacgggatgttaacgattggaatcggtcaaaaaattggtattttcgccggatcgggtgttggtaaatctactttacttggaatgattgctcgtaacgcccaagcagacattaatgtgatcggcttagtcggcgagcgcggccgtgaagtaaaagatttcttgcgtaaggatcttggagaagaaggactgcgcanaagcgtgattgttgctgccacctcggacgaaagccatcttatgcaaactacgcgccgcaactnccactttattccacattcgaccagaacctaggttcttgtcaagatcgatcgcttacgcccgg

SEQ ID NO: 1977 - DNA, 1635 bp, Listeria monocytogenes-4B
ggtgcgctttctgatttaacattgatgtgatttcaggaatttgcggtcttaaattctccacttcaacgccgttcatagttacttttccagctgttggcagtaaagctccttgaactaatttaagaaaagttgatttccctgttccacttcgaccgataatcgccactttttcaccttgttgcaatgtgaagtcaaaaccatttaagatttctggtgacttttcatcgtacgcgaaagttagattttctgcttttaaaacaacattttctgtgttgattcgctctatttctttcgtttcttcttcaaaagttggtagcgtcggatcttctattttgtctaaacgagcaagcgagtcttggtataatgatttgtcactgatagcacttgaaactggtacaaacgcttctgctagcgccataattgccaaaacaaaagcggcaatcatcgttccagaaaaggctccatcacgtgattctgctgtactccaataaaccatcacgataaccataaagccaacaactaactgactaaagaaatcgcgccaattaacaaaatgaaactgtttattttctgttcgaagcatgtctgcctcgtctttttcgtagttagaaataaatgttttttcacgtccactgaatttccaatcactaataccaaacactgcatcggtaaatttttgatataaactattgcgcccttgttttagataagcattctttccacgagcatataaaagtgatacccatggaagaacgagcacaaggaggccaatcaagagtacaaagagcgcagcaaatggaatcgagaatgctccaagcgcgataacgacgcccgcgtaaagcacgaggctaacaattgccggtagcattgtagttaaatagaaattttgtaaatgctcaatgtcacctgcgaggaggcccagaatatcgccagttttataacgtgattttagtagtaacgcttgcggctcaagtaaacgatacaagcgaacacgcatcttttccagaattctaaggacaagcgaatggctcgaaaggcgttccacatagcgtgaaacggagcgcataataccaaatgcacgaacaccaactgtcgaaatataaaccgccatgatggattccggcatcaaggacgatttcgaaattaaatgtccagacgtaaacataagtgctccagcagaggcaaaagttagtgttccaaggaagatgacaagtaaaaacaagccgcggttttctttaatatatgggataatccagctacttttccgcatcatacttcctccaattgggctttgactaaattgtaatagaaacctttacgcgaaagtaattcttcgtgcgttccagtttcaacgacagccccgtgatctaaaacaataattcggtccatttcgagcatccagtgcaaacgatgcgtcgcgaaaaagacaagtcgattttcaaataagtctagcattggtttttttaactcatattccgtttcaatatctaagtgggctgttggctcatccattaacacaattggacgatccgttaagaatgcacgagccagtgcgacacgctgttcttgcccaccactcagcatccgcccagcttctccgacaagcgtttctttccagcacacggtcggccgcta

SEQ ID NO: 1978 - DNA, 2048 bp, Listeria monocytogenes-4B
  misc-feature (1)..(end): n can be any nucleotide a,g,c or t/u
cgacagtgcgctggaaagtaatcggtgtgttttcgtgttcactgcaagcgatgagtctcatatccatgtttatatagcgtttgcgttaaaccttccagtaaagtcccgtaaaaaatcccgccgtaattcgttaaatagacttcgataatttttgtttctcttgtttttaacgttcgtgctgccatattgggaatacgtggcatncattttttatggtcataattcgttttcgcgtttttttggtcactttcgggctgccattaagcgcgtacgatactgttgaaatggaaacccctgcctttttcgcgatatctttaattcctaccacgtgaatcgcatccttttctgttttcttttattatacacaaaacaaccttagagacggttattttttgaaaatttaatcgtgatttgtgaacattttgtcgttaaattctttttcggtaaaacgagtgcgccagttcggtacaaattcgcttcattttcacctggttgtttttcaccattcacgacaatagaaccctcatccgcactttcgaaagtaagatcaagcggataattatctagttcaatatgacattctaatccatctaattcttcaggtaaaattggatcaaaaataagcgcatcttccgtttggcgaataccaagaacagaacttattaattgatgtaaatagattcctgggccactagaataaatccgccagccgcctttcacaggaatactaccttcttttacacgactaaactcattttgcgcctgatagcgatctaaaaacgctgcatcagaactactgaaataagtattactttgacgaagtgccgcatttgggacaacttcttttatgttgattggattaataacatccagcatatgccaagcggatttatcgccaatttttgctaaagcttcaatataacgaatatgcgcgtgcacatattgcaaaccgacttctcgaccaaaattggctgcttgctctgcccgtttaaaatgagtacttacaccaccagcataatgcgctggctcactcattaatcttacgccatcaggatgaagtagatgctcaccaataatttcaaaattgcgactggcttgctttttatcgactaattcagaaattacacttctcgtcagtggtattaagcgatatttaatattcgtatctttgtcttctgggtgaatcatccatacaggtgcttttccttcttctaaatataggaaacctggaataacatcagtatcatttgtcatatatttcgcaaagtccgcttgaacattgtttgctaatgtttcgtatttctcacctactggcaaaaatgcagctaaacgtttaaatgtttgatatgttagcgcgaccgtccagctggacaccatgtttttcttcagctgggcattagctggttgaagtgtgtcatcccagtcaccatcgccgtaattagaaagagccgttcctttcataaagcgggcttcaatcgtttctactgcaagttcgatgtgttcaagaagagttccttgctctttcgtaaaggttttcgattcgcgatcaacaaaaggaatagcttcttctaaaatccctgtatccccgctcatttccatgtaatcaccaataattttcagaggccaaacaataacatcgccatggctttcttcttgctgaatcgatgtatatttatcaaacataaaccattgtggccaatcaccagtatcttgatattgatgagaaaaaatcgtcaacactagcttacgtaaaacagctttattgcctgttgcaaggaaaaattcaaatggaccttggctcacatcacgcgtaccccaggccgccccgctgtactgttctaacccatgtggtgaagcatagtgaactaacatttggtgcgcgtaccaataaaccgttaagttcagtttctccgctgttgtactttgatgatttaaatggaactgcgcagttaattcgtcatagctagcgcgaattactttgttatttgcttctaaatcctccgttggttcagaaattcatcagtgagttttgcttgaacgtggaaagt

SEQ ID NO: 1979 - DNA, 1951 bp, Listeria monocytogenes-4B
aaatgcgccgtttctacttgcttaaactgcttccgcccagcctgcatgaagtccgccacatacgtatcactaattccgcgacccttcaaaaacttcacgaaatcactgttttgttcacgctcctcgcgcattttcactgcaagctcgcggtttaaagccgctagttcgagacgcatcgctgacaattcttcttcctgtgtttttcgttcttctaaaagcggcgttgactgtgctagttccgctcccgcagcaagcatttctagtaatttttctttttttaataagtcgtctgttttcggtctgtttttgacaaccgatttttgaaatgtttcttgaaagtccattcgaccatctgctatcgccacttcactcataatgaccgccgtcacttcatactgtttcttaaaaatcccaagctttgtgacacgttcatccgtaattttatatggctcattcgtgactaagcgaatttttttatgtatttctcgcttggagttcgccttaaaaatttccatcttttctactaaatgttttcccatttctacggattacctccctcatcaagttggttcaatcagtgcaatttgctccacttctgtttccggcgacagttcactaatggagagcaccggcacgtccaattgatatctttccaaaactcgcacaaagccaaatcgaaaatcttttcgccttgttaaaatgacaggttcacgaccagtgagttgcgctttattcacggtatctcttactttttgaatgattggcagttccttgtcgagcgcccagttcagcgcgtagccataatacggcgtgttgacaatttctgtatccatttcaatcgaatcttgcaaaagtagcgcgtaaattttgccatcttgatttttcgcttgttcacaaatgactttcgaaatccgctccctgacaaatgccgtaatgccatcaagatcattcggataaatcgtttgtccatcaataatcccttcgacaatcgttggtaaatcgcgaaccgaaatcccttctttcaagagttgtcgtagcaccccttgaattagcgaataatcaatttcttttttcttaatttcatcaattaaaatttgattttcatcagcaagtccgtcaattaaatctttaatttgttggcgcatcagaagctcatgcaagttcttccgcagcacaacatccaaatgcgtaattaaaatactaagcggttcgagcacttgatagtttttcatctgcgcatcttctaactcacccggcaaaatccagtaaccatcttccccgaaaatcggatccttggtcggctccgcatcaaggtccatcatcacgcctggtgtttttagcgctaataaatgtcctgcctttaaaaccccgctcgcaacagccacacctttgaccttaatctcatatttcccgcgcggctgaaaactcgtattatctttaaaattaatccccgggaccccaatacctaaatcttgtaaaattgattttcgcattaagacgactttatcttttgccgtttctccgttcattttttgtttcacgagagccgcaatgtttaagccaagttccacaactacagggaattttctgtgctgcgccaatgctgattggttccgttcacaactggttacactggataactcttttttttaagtgcaatggctctttttctttatggatggcgtcgataccgagatggaagcctacgccattgcacaatggaatcccggtccgggctaatcaccatggagatagcatggtccagcgttcatcgaccgcgagtgcgcatggatcctacatatcccgaccgctcctagtcacctgatcggcgctccctattgtctttaggtcgaccgaagtgtccgggttagggagccatgccggctacggatccatccccgactggtccttcgtctgtgtcgtcgcggcggccgcgtagaaaagcaggcga

SEQ ID NO: 1980 - DNA, 2230 bp, Listeria monocytogenes-4B
  misc-feature (1)..(end): n can be any nucleotide a,g,c or t/u
cgtatgggcactctagagcatgttcgagcggccgtcagtgtgctggaaagtcatttcacttggattcatttatttccgagaaagtaccgctgtcgcatttgaaagtacaaatactgcttcctttcttccttctaccggagatgcattttcggtttggccgattgttattggagtggtgcttgtcgcgcttgctgtcgtcctatttattaagaagaaaatataaaaaatcgtttgagagcatgagatatgctttcaaacgatttttttatgggtgacttaggtaaatggcttgctttcccatagcagaccagccttcttcaagtacacttctttttacggcacggtttttatgtccatatggatcattaatataaaaattgtttttatcgaacccggtaattaccacactgtgcatcgaatacgtgattttctttttaccttcttttgtttggacggtttgccagtttttgggtgcatggtagtcggtggtagtgataatccatactggtgcgcctgtgctgagtacagtaatgatgtcttgaatgctattcccgctaatatcgtggacgtgtgcttcgttaacgtatttagcggccagattagctatgggagcatgattcacgcctagaccagggctatcgccgctaatgctcccaacaaatgctttatccggattaccgtgtaaaccattttgttcgattggtgttgttgggagattattcgctaactcatttttcgttacacgctttccattgaattgtaagagcattgctaaactcgttacttcgcagccattaaaaagcgtaggagcatccatttgattcactagtggcacatctaatcttacattaaaaggttcgttgtctaatttataaacgactttggcgctttcgagtttgacggttggtgaataaaaggtatatttcgtatttagaagggtcaaactaaatatacacgctgtaatgacaagcagtgattttatccaaattcgcattatacatgcttcctagacattttctgctaggactggctctcctggatcttttgtttctgattctggctcttctgttacttcgaccgcttcttcgctcacttcggtattgaagttggcgatatacccttctaatgaaccagaaattttttgcatttcttcggagataacaactagctcgtccactttcattttgtttacttctgcgaattcaagtgcagcagtggatttttcaccgatttgattggaaatttctgttacgtcgctaattgacgtgttgacttcttcaattcccgcagccatttcttcggtttcttgagatacattttgcatttgagcggaaatatcattgacacgattgagtaagtctgtgaaagttgcttccgtttcagaaatgattttttggccagcttctgattcggaaagacctgtgttcattacttcgatagtagtttttgattctgtttgaatttttttcagaacagtattaatgtcaacaacagcaagtcgtgattgttcagctagtttgcggacttcttcggctacgactgcaaatccacggccatgttcaccagcacgagcagattcgattgccgcatttagggcaagcaagttggtttggtcagcgatatttgtaacggtatccagcgctttttccacttcaccaacgcggttaactaattgagaaacaacgtctgtacttgaacgcataacgccactgatacggtccatttgggacacgagattattgataacggcaatgccatcgttcgttttttctgcggaatcttttgttaggtcagatactttaagcgcgtattcagccacattttgaacgccgccagtcatttgatccattgcatccgtgctttctttcatgctgccgatttgtgtttggatttgctcacccatcattttcatttcgatgtccatttctgtcgtcattgcagaaataatttccgaactaataataacgttatcactggaagatttaacgtctgtagaagcttttttaacgtcttcaatcattaatcttaggttttcgctcatttcattcaagtcgtttgtaatatcaccaagctcgtctctccgtatagtgtgggcacatcctttgctgaggcatataggnnnnnnnnnnnnnnnnnnnnnnnnnnnnnnnnnnnnnnnnnnnnnnnnnnnnnnnannnnnnnnnnnnnnnnnnnnnnnnnnnnnnnnnnnnnnnnnnnnnnnnnnnacct

SEQ ID NO: 1981 - DNA, 2286 bp, Listeria monocytogenes-4B
ggaacttttattgactccttgaaaaagcaacaagtcgagatgatttttggctatccgggtggtgcggttctccctctctacgatgctttttacgactgtgatattccgcatattctaacaagacacgagcaaggagcgattcatgctgcggaaggttatgcacgtgttactgggaaacccggtgtggtagttgtaacaagtggacctggggcgacaaatgtattaactggtattgcggatgcaatgagtgattcgattccattagtgattttcaccggacaagttcatacgcctggtatcggaaaagatgccttccaagaagcagatatgattgggctaaccattccaattactaaatataattaccaagtgcgtgatgttcgtgacttaccaaaaattgtcaatgaagcttttcatattgcaagcactggtcgtaaaggtcctgttgtcgtggatattccaaaagacatggggattatccaaacagagtctgtacgaccagatacgattgatctgccgggttatcaaccgacttattcaccgaacccacttcaactggaaaaactaatgcaatctctttctgccgcaagcaagccactaatacttgccggagctggcgtcaatcatgcgagagctacagctgaattactagaattcgctgaacgctatcaaattccaatcgtgaatacgctgcttggtctaggaagtttcccgcaaagtcatgatttattccttggtatgggcggcatgcacggttcatacgcggcaaacatggcacttacagattgcgatttgctcattaattttggttcccgcttcgacgacaggcttgccagtgcgccaaaagaatttgccacaaaagcaacgattgcacatatcgatattgatcctgctgaaattggcaaaattatcgaaacacaaattccgattgtagctgatattaacgaaacacttacacaactactacaaatggaacttccggttcatccggatacatctcattggtacaaattaaatatgacccgaaaaaaccgtcatccttttaattttgatagaacgaaaaaagcagaaattaaaccacagcgtgtgattgagctaattggtgaaattacgcaaggtgaagcgcttgtttctaccgatgttggccagcatcaaatgtgggcggcacagttttatccattccaatttgatcatcaaattattacgagtggcgggcttggcacaatgggctttggctttccagcagctgttggtgcgcaacttgctttcccagataaaacggtagtcgccattgttggggatggtggtttccaaatgactaatcaagaactggcgattttaaatgattaccaaaacaatgtgaaaacggtcattatcaataacggttcgctcggcatggttcgtcagtggcaagaaaaattccacggcgaaagatattctcattcgattttcacgagccaaccagattttgttaaactatccgaagcttacggtgtcaaaggggttcgcctgacaaatcctgaaacgctagaaaaagatctaagaaaagccttcgctcaccctggaccgattgtcattgacgttcatgtagccaaagatgagctagtacttccaatggttccaagcggcaaaccaaatcaccaaatggaaggagtggaataaatgcgccgaatcattaccgctacagtaaacaactcttctggcgtgttaaatcgtatcactggggttatctccagacgccaatacaatattgatagcatctctgtcggctggaccgaaatcccaaatgtttctcggattaccatcgtcgtccatgtcgattccttatacgaaatcgagcaagtaactaaacaactcaataaacaaatcgatgtgctcaaagtgagcgatattactgacgatgcacacatcgaacgcgaactagctttacttaaaatcaactcccccgctgccttacgatctgagctaaacgcagtcatcgaaccatttcgcgccactgttattgatgtcggcacgaaaaatgtcgtcattcaagtaactggcacaagtgaaaaaatcgatgctttcgttgacacagttcgcccgtatggtattaagcaaatggcgaggaccggcgtcacaggctttacaagaagccctaaaaaaatgggttaaaaatcatttactacagagcagtctcttgctttgctagcatcagaacagcacatcgctattctgaatataaaaagaaattagttggagggtaggaaaaatgacaaaagtttattatgaagatgcagtaaaaaa

SEQ ID NO: 1982 - DNA, 1782 bp, Listeria monocytogenes-4B
gcctcggaaagtggtgtgactcattacgatatatccgaaccaggtatgacgaatgcgcaactccatataggttttcggaactttgcactggaaggatacacgcgaaatacgttcccgtttaaaaaggcctttttacgaaaaaaagaagaagaatctgccattttatctatttctaaacaaattatagaagaaaaagacgcagagaaaccaggatatgacttgattttaaaggctttcgtcatgcaattaattatacatgttttacgcgaagccaccccagaacaacttgaaaataacggcgtcaaattatctaccgacgagcagcaaaaacagatacttgtaaacgaaattattcattatatggaaaaacaccacacagaagacgtctcgctctcaacgctttcgcaaacgatgtacattagccccgcctatatctccaaagtatttaaagaagaaaccggggaatcaccaattaactacttaatcaaaattcgtcttactcgtgcagaagaattactcaagaataaagacgttaccgtaaaacaggccgtaaatatggtcggatataatgatgcttattattttagcaagcttttcaagaaatattacgggtttccaccatcagaaaactggcgcaaatcgagttagaattccaaaataagacagagagaaggaagactggatggaatataaaaaagctttagcgtttataaaatcaaatagcattctagaacaagaagaaggaacagaagttatttttaaacaggcacaagaaacagttcgagggaatttggatccttttttattaaaagacctgaaacaacatcttggcggtacgaatgatgcgataaaagaagcgccgcaagaaatccaaatgccagatttttctaatttggaaatagcaacggcagctgcactacaaatgcgagcaacgatgggaagtccgaatattgatttatcaaacggtgtaactacggaatatcgggttgttgaaggggactatggcgatattccggtacgaatttatcgtcacgaagaagcgaccaaaccagttcccgcattcattttttatcatggtggtggctttgttggtggaacgccggctgttgtggagaacttttgtaaaggtattgcggaaaagttaccggcagttgttattaatgtggactatcatttagctcccgaattcccggcaccagcagctccaaaagattgttacagggcgcttgaatgggtagtggaacaaagcgacgaactcggtatcgacgcttcgaaaataggtgtttctggagatagcgcgggtggaactttagcagcagcggtgagctatatggattatgaagcagagacgaattatgtaggatttcaagctttactttacccagcgctaacgttagtagatgaagataatgataagtaccagtgggatatttccaagtttggggcatcagaagagacacttccgctcgttgcaccaggtatcattggaatgaacagctctggcgaattactgcggacggcctatgttagagacgaaaatcccgcatcgccaatttattctccactatcggccgtagataaaagtatttatccgcctacacttatagccagtgcggagtttgacgcgttacgagcttttgcagatctttgtgctcacgaactgcgagcaagtggtgtgcagacacatgcattcgtttaccacggaatgtgtcatgctttcattgatgaatacgcggattttccctgaagcggaagacgtggcagatgagattgttcaaatga

SEQ ID NO: 1983 - DNA, 1868 bp, Listeria monocytogenes-4B
tgtttttatttttttttgttttgcatgagaagccgaaacacaagacgcaaagcgcgccgacccgccgcggcaaacccaggggagcgcgacagacgcacgagaaggcgaaggcggcgaaaccgcgaaggagagacgggaggaagaaggagaagcgacagagacaaaggcagaaagggacagaaacgggggacggcggcgcggaagccagccggcaaaacaagagaaagcaccgggctgtagagcgaagaaggaattcgtaagggggacacgacgaaggagacgttcgcttcgaatgcgtcacgccactgctcacctgcgagtttttcaacatctgattcacaccgccgcagtccagcgtttagcactagaacatctagtccacctaactcgtcatatgctttttgcactaaatctttcgctaaaccttcttttcgcaaatcacctggtaataagacacatttctgtccagcttcctcaacaatcgctttaacttcctgtgcatctacttcttcatccggatgataatttatcgcgacatcagcaccttctctagcataggcaattactgcagctcgacctattcccgagtcgcctcctgttacaaaggcttttttcccggttaatttattcgcgccttgataacttgattcgcccgtatctggaacaggcgtcattttactttgcaaaccaggataatcctggcgttgcttttcaaattttcctgtatggtatttgtttaatggattttctttattcatcataaaaacctcctatatttttgcaacgtaacccatgactaagtaggctacgaaaattattaaaatggccaatataagtatccaccaaatattagcgccaagttttcgcttcacttttttatttcccattttcactacccccattacttaatgtcttccctccagttttacgctaaaacgtttaacatcaaattgaaaaagaattgtagtaaacatgaaaaaaagagaacggaaatccgctctctttttgaaaaaatcgctattaacttcgaagtcctcgccctttactaattaaataccaacaaatcgagtaaagaacggcactaaatacaacaagaatggatagagaaattgctactggtacatctgtaacacctaggaaaccgtagcggaatccggaaatcatatagacaatcgggttcactttagaaatcgcttgccagattggcggtaacatcgaaatcgcgtagaatacgccgcctagatacgttaacggttgtaagacaaaagttgggacaatggatacatcgtcaaatgatctagcgaaaatcccgttaataagtcccgcgagtgaaaataaaatcgccgtcattaagaaggtaataataccaatcgtccacgaatgaatgtgaatcggcacaaacaccatcgaaataagcgtgacaagtgctccaactaaaacacttctaccaatcccaccaatcaaaaagccccaaataataatatgcgttggcaccggcgcaacaagaatttcttcaatgtttttctgaaacttttgcgagaaaaaggaagacgatacattggcgtaagaactagtaatgacggacatcataatcagccccggaacaatgtactccatataagaaaagccattcatttccccaatgcggctaccaatcattttcccgaaaataataaaataaagcgaagtcgtgataactggcggcacgagtgtctgtacccaaattcgcatatagcgattcgtttctttcgccgctagactttttaaagctgtaaaatatagattaaacatgtttctcccccacttgatgtttttcttctgtaattttcaagaatagttcttccagagcgattcgatttattacgcat

SEQ ID NO: 1984 - DNA, 2232 bp, Listeria monocytogenes-4B
gtgctggaaagtggaacttaatttggaccaccttggaacttctattatcgaacgtgttaactagtataatagacggatcgctccgttataagcgacaagagtgaagtagttatttttagctatttctgaatcttgggtggaaccacgagcataaactcgtcccttgacaacaggagggaagggcctcctattctgttttcttaaccacacttaaaaaagaaaaggattttatttttatgaaaattttatttccttacggtgcagtaaaagaattcgttcttggcgtttcaacagctgatattgctgcttctatcagcccagggctaaaaaagaaagcactcgcaggtaaattaaacggggagttacttgatttagtaacaccaatccacgaagacggagcaatcgaaatcgtaacaccagaccatgaagatgcgcttggtattttgcgtcacagtacagctcatttaatggctcaagccttgaaacgcctttatccagatgtgaaatttggtgttggcccagcgattgaatctggtttctattatgatattgatacagaggcagttattagcgatgaatctcttgttgaaattgaaaaagaaatgcaaaaaattgtgcgtgaaaatgttccaattgagcgcgaagttgtttctcgcgaagaagcaattaaacgtttcaaagcaattggagatcaatataaattagaacttatcgaagcaatcccagaagatgaaacagtgacaatttatacacaaggtgaatttttcgacctttgtcgcggagtccatgttccttctactggtaaaattcaagtgttcaaactacttagcgtggctggtgcatactggcgtggcgatagtaacaacaaaatgctacaacgcatttacggcacagctttcttcgataaaaatggcttaaaagaatttatccaaatgcaaaaagaagcgaaagaacgtgatcatcgtaaactaggtaaagaactagatttatttgcaaatagtattgaagttggtcaaggtttaccactttggttgccaaaaggtgcgactatccgacgcgttatcgaacgatacattgtggataaagaagaacgccttggttacaatcacgtttacactccgattatggctaatgttgagctttataaaacaagcggtcactgggatcattaccatgaagacatgttcccaacaatgaaaatggacaacgaagaactagttttacgtccaatgaactgcccgcatcacatgatgatttataaaaatgatatccatagttaccgtgaactaccaatccgtattgccgagcttggtatgatgcaccgttatgaaatgagtggggcgctttcaggacttcaacgtgttcgtggaatgactttaaatgatgcacacgtatttgttcgccctgaccaaatcaaagatgagttcaaacgggttgtagagctaattttagaagtatataaagactttgatattaaagattactccttccgcctaagctaccgtgatccgaaaaatactgaaaaatattttgacgatgatgctatgtgggaaaaagcgcaagccatgcttaaatccgccatggacgaaatggaaatggattactttgaagcagaaggtgaagctgcattttacggtccaaaactagatgttcaagtgaaaactgcaataggaaaagaagaaacactttccactgtacaacttgacttcttacttccagaacgctttgacttaacttacattggcgaagatggcgaaaaacatcgtccagttgtcattcaccgtggagttgtatcgacaatggaacgttttgtcgcatatctaatcgaagaatacaaaggtgctttcccaacttggttagctccagtacaaatggaacttattccagttaatgcagatgcacatttagattatgcaaaaggtgtacaagataaattacaacgcgctggacttcgtgctgaagtggatgatcgtaatgaaaaattaggctataaaatccgtgaagcacaaacaaagaaaattccttatgccttagtattaggtgaccaagaagtagaggctggttctgttaacgttcgtcgttacggctctaaagactctgaaacaatggatttagatgcatttatcgcacaagttgttgctgaagtaagcaaatattaatcacgaaaatactgtctcttaaagggggcagtattttttcatggtgcttttttcctctttttccgttatacta

SEQ ID NO: 1985 - DNA, 1523 bp, Listeria monocytogenes-4B
acacttgggacctgctgctgcttggcggccgacgtgtgctggaaagatctagaaattattcaaaggatgaaaaaagcagctaaaatccctgttcaagttggtggaggaattcgtagcatggcgcaagtggattattatcttgaatccggcatcgaccgcgtgattatcggttctgccgctctaacagatccagatttcctacgtgcggcagtccaaaaatacggtgctaaaattgtagcaggtatcgatgccaaaaacggttttgtggcaacaagaggttggctcgatgtcagtcaggtaagctatttagatttggctaaacgaatggaaaaagtgggtgttgagacaatcatttacactgatattagccgtgatggcacgctaactggacctaatttagaacaaatggcaaatctcaaagaacacgttaaagttagtttaattgcttctggcggagtgagcagtcgtgcagatttggaagcactcgcccaactcggcttatatggagcaattgccggaaaagccctttataatcatgatatttccatgtcagatattgtagaggtggaacaaattgcttactaaaagaatcatcccatgtcttgatgtcacagcaggtcgagtcgtcaaaggtgttaattttgtttccttaacagatgtcggggaccctgtcgaaattgctaaagcttataatgaagctggtgccgatgagctcgtctttcttgatatcacggcaactgtcgaactccgtcaaaccatgatagatgttgtggaacgaactgctgagcaagtttttattccactcacagttggtgggggtatcagtagtgtttctgacatgaaagaacttcttcaagccggagccgacaagatttcgcttaattccgccgccatcaaacgaccagaactcatccaagaaggagcagcaaaattcggaaaccaatgtatcgttgtcgcaattgatgcaaaatggaatggtacaaattggagcgtcttcacgagaggcggtcgaaatgataccggacttgatgctattgaatgggctaaaaaagctgtacaacttggtgctggtgaaatcctactaacaagtatggacggcgatggaaccaaaaacggttacgatattccgctcacaaaagcaatttcagcagcagtttccgtcccagtcattgcttcaggcggttgcgggaatgccgcacatatggccgaggtttttgaaaaaacaaaggcaaccgccgctctcgctgcaagcattttccactacggtgaactaagcatcaaaaatgtcaaaacaaccttactcgaaaaaggagtgaatattcgtccatgacttctgtagatttttctaaaggtcttgtcccaactattatcctagacgatcaaaatggcgacgttttaatgctcgcttatatgaacgaagaaagttatcaaaaaacccttgaaactggctatacttggtttttttcgcgctccagaaacgaactttggaataaagggcgcgacagcggacatactcaaaaagt

SEQ ID NO: 1986 - DNA, 1674 bp, Listeria monocytogenes-4B
  misc-feature (1)..(end): n can be any nucleotide a,g,c or t/u
acggctatcgacttcgttatttaaaccattaattttaaaaccacctctttgttgcaactttgaacatggtcttcttttgccaactaaagcttctacgacaagttcttcattagtataaggtccgtacacttcagcagtatcgaacatcgtaatccctgcatccattgcagtgcgtacgacttcaatcatttcttttctatctttcgcaggtccccggtgataattgagtcccatacagccgaatccaagctctgaagttactaaaccagtgtttcctaattgtctctttttcataaaaatatgctccttttaaaccaaatttttaaattagaaatatcaggatgttgtatttagtttatcagttgaagtgaactttaagtcaagcgtaactaatttatttttaagagcatgagatagtttaacaaaagcgatgattaattttattttattgatgggggcttattctttgttcttggaaggaaaaattgcataaaagctgtcttaaataagcgctaggaacgattttagtagttttaatagtactaatacatcaagaaatgttacgaaaaaatgtcgacaaatactcaaaatcacgtaaatcagttgtaaatgagtatacgaattaaacgtattttctaagataataatatttatgatggaaattcagaaagggtgataacaagaatgaagtatatcgattaccatgattatatgcataaagacgcgataatatatgcttatctccaaaataattttccgtatatccgcaaacgaataaaggcgtgggaaagttttacgctagatcgagaagatattctattggtgaaaagtggcgcaatatttgaagaaattagtgggaagaaaaaaggcatagcacgatgctttttttcgaaaagtttaatttttcctactagaaatcaaatagtattgaaagctttcgaaacttcagaaatttgttttatcaatgctgaaacagcttttgggaaattagaaaaagatcagattttatccaatttttttctacagattgcggagaaaaacgaagaagacatgcgaagacaagcatttcttgggacagagaactcaaaaaataaaattatttcaacgctcaacttcttgctagaaaataataaatctaataataaaacacccatctttcctgaatggcttcaaataaatgttttggcacagttagcgaattgttccatctctaccatttcttctactgtaaacgaattacatgcggaaggaatattagatataaaatcttcgccctggaaacttaaaggcagagaaaagaggatagaaattcttgaaaatgagcaccagaaaataaagcttaatgaaagaaagcataagagtaatgttttctaatggtataagacttgaaaaaactttttgagtacttttccaagcacaaaaattatactaaaagaggtggaagtaggacttgaagaaaaatattttagtcgtaatgattgtttcggtacttgcaattagtgcagttgtatcagcttttttcttaatgagagacgatgcttatgctattgaaacggaaggctttacttatagcccgaaaggaaaagtagtagatttctcatcagaagccaagtataacgatacatggattaancatgagaaaacantaccagataaaaaagaatgaagccaata

SEQ ID NO: 1987 - DNA, 1182 bp, Listeria monocytogenes-4B
aggatcaggtagatgcgctagcctcataggggattgcagctacttttattaatagtacactgactaatagagaaatagatattcgactggatgctgcattttcaggtgagttaaagatgctttacattgctccagaacgcattgaaacgccaggttttcagcgtttaattgagcaggtacctatttcattatttgcgatagatgaggcgcactgtatttcgcagtggggtcatgattttcgccctagctacctgacgctgtgcgatagtttggataaaatgaccagacgtccgctcgttatcgcgcttactgcgacagcgacgcaggctgtttcagacgatatttgccgattgctaaaaataggagcagattcagtcgttaaaactggattttccagagataatttggcttttcaagtagtgaaagggcaagataaagataagtatttgattgattatttaacaaaaaatgtaacggaatccggaattatttatgcttcgactcggaaagaagtagagcggctgcacactttcttgctaaaaaaaggtgttgaatctggtatgtatcatggcggaatgaccgatttagcacggaaagactggcaagagaagtttctatatgatgatattcgagtgattgtggcgacgaacgcgtccggaatgggaattaataaatctaatgtgcgttttggtattcattataatattccgcgcaatattgaagcgtactatcaagaggcgggtcgtgctgggcgagacggggttccaagtgattggatcttggtggtttccccgcaagatagccgcatccagcagtttttaattgaacaatccgaaatggacgatgagcgcaaacaaaatgaattcgccaagctacgccaaatgacagggtatggttatacggaaatttgtttacagaaatacatcgtgcagtattttggagacgacgaggaaaactgcgagaaatgtagtaattgcttagatacaagggaagccacggacgttacaattttagcgcaacaagttttttcttgtataaaaagaatgggtgagcgttttgggaaagtattaattgccaaggttttgacaggttctgctgaccagaaagtgaaagattggcgctttgacgaactcagtacttatggattgatgaaagatgcttcccaaaaagatgtgttacaac

SEQ ID NO: 1988 - DNA, 2182 bp, Listeria monocytogenes-4B
atatttccatcccagaagcaatctctgggccttttaatccagaagtaggtacatttattaatttgccggcgattattattgttcttgtgattgcctttttattgacgcttgggataaaagaatcaacgcgcgtgaataccattatggtagctattaaagttggtgttattttacttttcttagttgttggtgtattttatgtcaaaccggataattggcaaccgtttatgccatttggaattagtggcgttatgaatggtgcggcgctagttttctttgcttatttaggttttgatgccgtttcgtctgcagctgaagaagtgaaagatccgcaacggacaatgccgattgggattataggctcgctacttatttgtacggtgttatatgttgctgtatccgctgttttaactggaatggtaccgtacacagatttaaacgtaacagatccagtggcttatgctttgcaagtgattaaccaagattgggtagctggcattgtatcacttggcgcggttgttgggatgattacagtaattttagtaatgagttacggggcgactagactgatttttgcgatgggacgtgatggtttattaccaaaagtacttgcagaaattaatcaaaaatatcaaacacctgttaaaaacacctggatttttgcagtgatagtcgcgattattagtgggcttgtaccattagatcgattggctgagttggttaatattggaacactcttggcgtttatgatggtgtctatcgggattatctttttacgtaaaaataaagatattcaagcgagaggatttaaagtaccattttacccagttcttccaattgtttcgttcttattatgtgcgtttttaattagccgtttgtctgttcatacgtggattctttgcggaatttggtttgttattggtttaattgtttactttgcttatggtagaaaacatagtgagttacttaaaaaataattaacttactttttgtaagtcgttttattggaatttgaacgctccttatgttgtaatgaatgtattacaataaaaggagcgttttttacatggcagaaattagtgaagaattacgacttggcgaagttgtattgaatgttggacatttaaaagagatggcaggtttttatcaagaagtaattggtttgaagttattagaggaaaatgagcgaatggttcggctcggcgtgagtgggtctgatgaagctttacttgttcttaaaaagatagataatgcggttgttccagaagtgccgcggattggcttgtttcataccgcctttcttttgccaacgcgagaaagtttagcggatgtgttactgcatttggctaaatcaggttatccgattgatggcgcgggagatcatgcttatagcgaggcgctttatttacatgatattgaaggcaatggcattgaaatttatgcagaccgtccaaaagcagaatggatgcgtgatggcgatggcaatttaccgatggtgacagaacaagtagatgtggattcgttgcttcaaattgcgaccgatgaaccatttacagggatgccaaacggaacgataattggtcatgtgcatttacaagtggcagatgctgacaaagcggaacaattttataaagaggtacttggaatgaacttaacgaccgctattccgtcagcaaggttttttgcggctggtgattatcatcatcacatcggttcaaacgtctgggcaggtcgcaacttggaacttctgcaagaaaatgaaacgggactcgcttggtttacaattattactcctgataaagatgcaataataaccaacttaatagaacaaggatatgatgtgaaacgattggaaaatactatttccgtgacagattctaacggaattaagattcacttcaaataaaaaaagaactgtttaagcgaaaaacgagcttaaacagttttttgatgcgataataagggaatggtagattagactaattattttaatgtttacgttgcattgttttcttgaaaagccaattgctagattggaaaagcgttaaagcaattaaaactacgccaattccaagatttaaatacgaaagggctacggctgcgttatctggaaatgaattttgcacagtgatgaaaataataaagaaaccgctatttgcacaaaacgcaatccaaaaccaag

SEQ ID NO: 1989 - DNA, 2443 bp, Listeria monocytogenes-4B
acttaatttaattgaaattttgtcagcatatgttgagcatggatctaatccaagttttagcattgatccttacgtaaaaccaattattcgtgtgattgaaacaattccgattaaagaattacttttccgtatgcagcgtgaacgttcccatatcgcgattttacttgactaatatggtggtacttctggacttgttacggttgaagatattgtagaggaaatcgttggtgatatccgcgatgaatttgatgccgatgaaattccagaaattcgcaaaatcaaagacggtcactttattgtggatgcgaaacttcttattgatgaagtaaataatattttaggtactgaaattgaggaagaagaagtcgacacaattggcggctggttcttaacgcaaaattatgaagtagaagttggggacgaaattgattacgatggattcattttccgcgtaaaacaaggcgaacctcatcatattgaatatatcgaaatcatcaaaaaaacgaatgactaatcaaaaagtagctatccctctcgtaggatagctactttttttatatacgatgcgctaacataaattgcttgaacttctcagctgcgggcgttagcgtttggtttttcgcgactgcgagataaaagaatctctcccagtttgggcttctaattggtaagactttgacatccacataatttaaaatcggcatgttcggaactacagcaatcccaaagttttgcgcgaccattccggcaatgacttgatccacttcaatttcatatgcaatttgataatcggcaccaatttttctgaacaaatcatcgataattggacgcaaaccactttttttcgagaatgcgatatgcggataatctaccgtttcgattaaatcaatccagtctttctcagcaagaggatggcttttggggacgatgagcactaattcttgtttggcaattggcgtaaagtgaatatttctttcattttcaagtttagaacaaataccaatatcaaatttcttttcttttaggccttgaatgatatcaatcgaaacacctgtatggaaaataaaatcgatttgtttttctggttcggtttggagaaattcttgaacaagctttggtattagagacgtgccaagtgtttgcaagaatgccaagtcaatctgcccttccccattcgccgcttttttagtcgtcgcgacacccgcatcaatcatatctaaggactcttccacataatcaagaaatactttgccagctttacttaaccctatattccgcccttctttttcaaataaagggatacctaattcttgctctaaggaggaaattgcgtgacttaaactaggctgtgtaatcagcaatttttcagctgcttttgtgtaatgctccatgtgcgccagtgtgacgaagtatcgtaaatggtgtaaattcatgcttctctcctaactaaaaagttatctatgcaatttatctatcaattaatagaacaataccaatttgtttttatggaatagtcataatacaattagactgtagttacgccagtgaaataaactattccttaaaaaccaatatacggtagaataggttaactgtccagttccattttcaactattgaaggcgttatcacatcagaggtttttaattaagcggaattaatttttttactggtgtttgtgaaaatattatcaaagtttcttgtaatttttattatggagaggagataatttttatgacaaatgcaaatggcaacctaaaaaaatgccccatcacgattagctcttatacgcttggaacagaggtatcttttcctaaacgagtaaaagtcgctgcggaaaacggttttgacggaattggcttgcgtgcagaaaactatgtagatgcactagctgccggattaacggatgaagacatgttgcggattttagacgagcataacatgaaagtaacagaagtggagtacataactcagtggggaactgccgaagatcgtacagcagaacaacaaaagaaagagcaaacaactttccacatggcgcgattatttggcgtcaaacatattaattgtggtttgcttgaaaaaatccctgaggaacaaatcatcgtcgcgcttggtgaattatgtgaccgcgcagaagaattaattattggtttagaatttatgccatatagcggtgtagcagacttacaagcagcttggcgagtagcagaagcatgcggccgagataatgcgcaacttatttgtgacacgtggcactgggctagagcaaaccaaacagcagaatctatcaaaaacgttcccgctgatcggattgtttccatccaactatgcgatgtccacgaaacgccttacaaagaacttcgtgaggaatcacttcatgatcgtctagctcctggagaaggctccgggatacggtcggttttgcaaaaattttaaagaaa

SEQ ID NO: 1990 - DNA, 2118 bp, Listeria monocytogenes-4B
  misc-feature (1)..(end): n can be any nucleotide a,g,c or t/u
aagtctttaggaaattttgattctgtcatttttgtatatctcctctcacgaatataatttacttttccactatagaatatgtaatgcattacatagcaagcaataatttcaaattttttaaattcgttttccattttatgattttaaagttcacaatttagccattaaaatccaaaaaaaagcctatttttgataaaaacccttttctccatactgatagaattagataactttttaatttaggaggagaaaaaatgaaatcaagaaaaaaagggattatcttggtactgtctattattataattttttccatcggtttattagtgaacaacatcatgacaaataacaaagataccgctaagccaaaaaagaaaaccgtcgctgctgttaaaaagaaaaaagaaacacctccaaaaccaaaagaaccatttaacattgattttacaggtgatattatgtttgattgggatttacgccccgttttagcagagaagggaatggattatccttttaataatgttcgcgaggaattgaaatcaagcgactatacatttgttgatttagaaacagctattacaactcgaacaaaaaaagtcccctaccaagaattttggattaaaagtgatcctagttctttaacagctcttaaaaatgcaggggttgatatggttaatattagtaataaccacattttagactattacgaagatggattactcgacacaacggctgctttacgcgccaataacctagcctatgttggcgccggtaaaaatgaagatgaagcctatcaacttaaagttgctgacatcaaaggtaataaagttggattcatgtcgttttgccactttttcccaaatactggttggattgccgatgaagatactcctggggttactaatggttatgatataaatttagtcgaagaaaaaatcaaagaagaacgcgcaaaaaataaagatattgattatatggtcgtctattttcactggggagttgaaaagacgaatacacctgtagattatcaaacccaatacgttaaaaaactcgtggatgatcatttagttgacgcgattgttgctagccatccacactggctccaaagttttgaagtatacaaagatgttccaattgcttattcattaggtaatttcttgtttcctgactatgtttctggtcattcagcagaaacaggtatttataaactgaattttaatcaaggtaaagtgactgcgcattttgatcctggtattatttcaggtaatcaaattaatatgcttgacggttctgccaagacagcacaattaaattatctccaatccatttctccaaatgcaactattaatagtaatggtgatatatccgcaaaataaaaaaagctgatgctagttcggttttaaccgttctaagcatcagcttttttttataacaaatgattcatatggccaatttccattacccaataagaaccaataactacgacaatcgcgataaatgcggcgaataaaatattaccgatttgaattttaccatcgcggccttctgtcatatgcatgaacatcagaagctgtagggctgcctgaatgaacgcaaagatgaaaataataactaccttaacatttgttgttagcgtcgaataaagagccacccagactgctagaagcgtcaaaataactgataacgcaaagccaacaatatgtttccaaggaatgccaccttcagcatgagctgcatttgatttattattttgtgtcatattagttcaccatccctagcaaatagacaccggtgaaaatgaaaatccacacaacatccaagaaatgccagtataaactggaaataaatacttttgatgctgtttttggcgtcaaaccatgcattttaatttgaatcagaataaaactaatccagaaaatcccgaccgttacgtgaagtccatgtgttcctagtagaacgaagaatgccgaccagtaagaaccgatttgcattgtaacgccttctgtcacatagtgtgcaaattcataaagctcaaagccaaacaatcccgcaccaagaattaatgtgatantcgagagtaaatcgacaacattttcacattgcctttacgcatctcaccaa

SEQ ID NO: 1991 - DNA, 2197 bp, Listeria monocytogenes-4B
gccgctggaaagtacaacagattacagcattttagacaagattgatcaagcgttccaagccgtgcattacatcgtgaaagagtcgttagcaccattagaacgttttattggtagcaaagttcctgaaaatgaaagtatatttattacccttttcattggagggcatttaatcgaatttacagagatatcctcaaacgagactaaaagcagttgtggtttgtccgaacggattgtcgatttcgagattgatggaaaaaacattacgaagcctttttccggaaatatttttctatcaagcgatgtcgattcgagaatttgaacaaacaaagttaggttatgacattgtattttccgcagtgccactttcgaccgacaagaaatttttccttatcaaccaactgatggatgggaaagaacgcctggagcttagacgccgggtgatgcgagcggtttacttagtggatgaggtgaatatcagcgtcgatcaattaatgaaaactatttccaaatttgctgatattaaagatgctgcccgtcttgaaaaagtgctagcagattatttaatgccagttccagaagaaaacacatccaaacacgaaggcaaaagcacactcgcagatctactcgaagtaacgcgaatcacacgtaagaaatcagtgaaagattggcatgaggcaatttatcatgcggctttaccgttactttcggcgggagtggtggaaccagcctacgtggaagaaatgaaacggcaatatccggcaccgattatgaacatcattctccgtaatacaatagctatccctcatgctgaaacggaaaaaggagtaaatagcctcggaatgagcttgctttatctagaagaaggcctgccacttgaaggcggtaaagagctacattttatcgttgtcattgcagccatagataaaaacgctcacttcacagctttactacaattgatggaattatcggagaacaaaaaagatttgaaaaaacttgcggatgctgcgaacacagaagaaatgcaccaaataattaaaaacttcacggacttggaaacaaaaaagacaatgtagagaagtcagaaagaattacaggaggatttcgtaatggatttagtacaatttttgaaaaaaggaatggtttgggttcaatcggatatcgagaaacaagaggacctattccaaatggtcgcagaaagtggaaagtctgaaggatatgtaacggatgactttttaacaagactaacagaccgtgaacaaacctttccaacggggctaaaattagatggatacggcgtggcattaccgcacacggatccagaatgcgttacggaacaatttatcgccgtaatcactgtgaaagatggcattccatttaaattaatggaagatgctggtcaaacggttgaagcgaatttgattttcgtactcggactaaatgaacctcacagccagctcgcggtacttcagcaattgatggggacgattcaggataaagacaatgtagccgcattactcagagcgaaagatgaagacgaagtaaaacaaattttagaaactattaccgtttaaaaaaaacaggaaaattagccgcgggaaatcgcagcaattaattaggaggaatttatcatgggacaatttaaaattttggtagcttgtggagcaggaattgcaacatcaacagtagtaacggacagagtagaacgtttggtaaaagaaaacaacgtggatgcagaagtaaaacaaattaaaatttcagaagcagcatctatgcaagacggagcggatttaatcgtatcaacaactattttaccaacaacttacaaaatcccagcgattattgcaacttcttacatcactggtatgggtatggaagaattagacgaagaaatacttgcgcaccttaaataaaggctgcgcaagggagtttagaaatcatcattaaacagagaaaaaaggaggaaatattaaatggatacacttctgtcaggagtacagcctgtcctaaactcggggcctacagtaatcgcgcctatgatgatcccccttattgcattcatttccccgagtgccacccccagaaagctctcccctccacccatccccatctgcgcttcggctctgtctgcctccacgccttgctctgtcccccacttcctcctcatcttcctgtctcatacccccacctaacccgcact

SEQ ID NO: 1992 - DNA, 1902 bp, Listeria monocytogenes-4B
cttttggcactctagagcatgctcgacggccgacatgtgctggaaaggtatactattgctatatgtaaaaaaagggaggaagaaaatggttctacttggtgcgctagtgaatgggcttgggattttgattggctctgttattggcatgaaattacataatatccctgaacgtatgaaagacacggtcatgaaagggatgggtttatccgttatcgtccttggcattcaaatggcatttaaaacgagcaactcgcttattgtcattttaagtatttgttttggagccgttattggggaatggcttaatatagattatcatctgaatcagctcgggcactggattgaacgtaaagtcggtgccaagggaaaaagtaatgtttcaaaaggctttgtgacagctacacttatttttgtgattggtgcgatggggattattggtgcgcttgatagcggcattcgcggcaatcatgatgtactttatacgaaatcggtgatggatggatttatcgccctacttcttagtacgacacttggttggggcgttatgctttctgcgattccagtgtttctctttgaaggcattatcgcgttattcgcaacccagattaatcaattcgttccggcagacctgatggcactaattataaaggaattaacggctacaggcgggattatgattttggcaattggtctaaacttgcttggtttaaccaagattcgggtcgcgaatcttgttccggggattttagtcgttgcgctgattattaccgggctttattatttttaaaagaaaaaacagagaatcgctcatctctgtttttttaatttcgtttaaatggcgcttctacatctaaacttattaaatctgtatatgtttgcggttttcggtaggcatttccccacgtttcattttcccggtaagttcgaatctcgtctaaattaaattcagcaataaaaataccttctgaaacgtcctctgtttcaataatcgtattatcgcggtaatccccattttcatcaaaaacaatcggggaaaaagcagtggatctgccccatttttcgccaggatagtttgccatcgctacgccaaccatgttttcaaaagcacgagaatttagttgattaagtctggctggatttatatcacaagcatttggaacgaggataatttctgccccttttaacatgagaactctggcgctttctggaaactcgcgatcatagcaaatcatgacccccagcttaataccatcaaactcacaaactttaaattcctcgccactttgtagtaatatttctaaagaaaaatcacacgtatggactttggcatagtctaaaattatttctccttttcggtcaataataatagcagtattttgtggtttttgttccgttttagacaaatacgtagcgcaaatgccaatcttcaactctttggcaagttctttcagtgtcaaaacatacgcactgtcttctgtgatagcttcatttaaccacttggttctttcattatcaaaatcagtagctaggggatgattaaaagcatcttcaaaagggggcgcataaccatttgaccacatctcagggaaaagtactaaatctgcccctttttcatgcgcttcttttatatatttaatggctaatttcaaattggcttccttattatttggtactgctttttgttggattaatgcgatttttatagtagtcatatagcgcctcccattagtaaatcttcatgttattataacatttattcttggaaacaaaaaaacaccaacaacccgaaagttattggtgttttgccatataaaaacttacatgccgcccataaagaatgctgttgttaattcttgcatgaatgccatgtcattttccattttccacaaagaatcgtcatct

SEQ ID NO: 1993 - DNA, 2711 bp, Listeria monocytogenes-4B
agtcaaaagctctccattacttccaaccataattaaactatgcatcgcagaactaaacgaaatccccgctaattcttctttattcacatttttcatcacagcttgaatagatgataaaactgcttcgaaaatttccgtggggctctcttccgctttcccagtttcatccgttattagttcataatgcgtcgcctgccggaaaatcacttctcctcgttgattaaaaagtactgcctttgtgcttgaagttccaatgtctacgcccattatgtatggtttactcgtcaaacaattcaccccgcgttttcgtttctttttattatacgtcaaatagaagaaaatttggggctaggctacttagcttttttgccaaacaaaaaagctagagaaattctctagcttaatttataccgtaaaaagtttttattcggctttcttcacctaacacaataagtgtatttttatccgcgaattttagcacttcttttgtattggcttcactttgagcgacgcaacctaatgtgtaattgtatttcggtgaatcaacatggtaaaacacagccgatcctttaccttttacacgtttagcgttgtatttcacttccattccgtatttgtactgcggaatcttcattttttcatctgcagaactagaggaattgcgttcttgccaagtgttataggatttgtcgttagagttagaaatccaataacttctattagtaatcgctctgaatgtcagcttcgtaccaggattacccttttgcccaaatgcaatgcctgtacgataaacgccaactggagttccagaacttttttcagagaactttggatcaaatccccatttgccaatatgactggtaaaatgacgaacttcataccaatttcctgcactatttttttggaaaaagtaggttgttgcggtagtattctttggttttgtggtgatgattgcctttttactgttccaaagagctggaacggtgtcagcaattgttggtttgccgacattcgtaaaggcacgcgagtcaatccatccgattgtagtatttcctagcttacaataataccatttagctcttgctgtttttccttcgcgcgtaataatcaacgtcttcttgtcgtatttcttagctgaaccgaggtacttaacactactactcgttttgtacatcttgctattaataccatcatttcgttttgactgatttactaccccttttagattaactgctttgtcataaatgattttttcgtaggatgctgcttcggcattaaaggagtgaccaagtaggctaaccattaaaacaataattaaaccgcttaataacttcttcattattcgctccttatttttgagttattccctatagcaattagtttattttttacgtttcctaagtaataacactgccacaagaataactataacacccgctaccacgaaaatccattctgtacctttgtcacctgtgcttggcaaatctgttttgtcatcttttgaaacttttgtaacatcagcaggttttgctgttgcgcttttgaccgcgttctttgtttaaaatttcttcactttatctggagctgttacgactgcttcattttgttttttcgctgggacttgataggttacttcttcactataattacctgattcatcaaaagcatatgccgtaatttgttttggtgttgtcgcccattctgcataaaaatagccatctttatccgcagttgttgttccttctccaaagttttcatctgccggagaactcatatatacactagcgaatggttttgttttacctgtgaaaatttttgtttctaaatcaaaattcatatctgtaatagtcagttgggccgttttttctttgactaagtaattgagtttgactgctgttgttttgccgtcttcattatctccaaggagcgtgacttcttggatacctgtttgtgcagtacttagtttagaattggctgctaagcgataattggttagttttgtatcggtgtaatcagttaatgttgcggtgaaatctttgagatcaatcttactattttgttcatacgagtaaacttcttgagaatcggtaatatctatcgttgtttgaactttgcttttttgcgatgttgttacagtcgtgtcttttgtcggtactgctggttctggcttttcttcagtaattatgttttcagtagtatctgttgttttttcttctgtaggtgttgaattgttaccattttcatttgtttcagcgcttgctgccaatgagaatggaatgattagacaagttactaacgcagtaagcactagcccgtggaattttttcataataaattcccctttcattttgcttagtttaataataagcagaaatgtgatgaaagtcaattttaaattacaatattgttacaaatattaaaactgcgatacaaaaaaaccttgctaagattgtacttagcaaggcttaattttataattcattcgggcgatctagttgataaagtcgtttatagcgtggttcttctgccattaattcagcatgaggtccttccattaacgtttttccctcttctaaaaacaagacgcggtccattttttcggcaccaactaaatgatgcgttacccatttgagtgacttatctgctaacgtttcaaagatagtcgctagaaatcgcgttctgtattgggtcaaccactgttgttcgctaaa

SEQ ID NO: 1994 - DNA, 1948 bp, Listeria monocytogenes-4B
agggtcgaggggggggggggggtccgcggggtggggggaggggcggctgcgaacccgtggggcgtggtggggggtgggagggggcgggggcgaggcggggggggcgggggggggcgggggggcggggggggggggggggggggtgggagatggagagggccgcccctggggcatggcgatgatggagcggggttacatcttgttgatcggattggtatgctgtgattgtttcgatagctgtagcagtgtatagatttgcttgtgccataaaataatcattcaatccagcaatttggtttgatcccaaaaaacttataacatttttattcttctctaatgaaactatccctttttcaataaaataaacctttgtatttattgtatcctctgttagtaaaatcatgttgctcggtatccttgtttttttataagggattctgttatcgattaaagtttgcaagaagcatgtataaccaaattcttcttccaaaatttttttactatacaaatcttcaaatacggattgcatttattgtcatctcatttctattttatgttgttagcaaatagttttataatgcgatgagtggcttcttacaagtgatgatactaccaaacacttttaaaaggaacccaacaaaaaaacaaaacttcctgctttaaccaactatttttgacttttttgtcacaattgaactttattcactttataaattattccataactttcttttcatacttctattattttactaagcacattccctctacttttctatccaaaaatttcaagcaacattttactcaaaatactatctttctaactacctttttagaagaataacctctattttttaatgattatcgcgatattttgtattatttgtgaaagttattaattcgtgtttttattcttccccgcttatgtttacgcaaaaatattctactagaagaataagttttatgcgcttatattgcgggaaactaatgacataggggggaatggtatgtatttaaaagaaacgttagatcaatttgcttcgatagataatattcttaaactgctcaagaaaaatccgagttttaataagcactgcattcaagagcggctcccacaaaaaacaattatcacatccaataaacaacgaaaacatatctatataatagaagaaggttttatgaaactaatatttgatgacaacaaaccgcgtgatttttcttatattttgtctaaaggagcatttccctttttgccagtttatacagaggatatacctgaacacacaatgatggttgctcttacagatattgtatggtggaaaattgatatcagtttctttaaggggatgatggagacggaagatccgcgaaattatctcatgcttcatcaattagcggaaactagaagaagattttacactatcgcttatcaagaaaaattgacttcacgtgaaagtatttattattctttaagtacaatgattgaatttggcctacgtatctccgaaaaaatagtagaacttccagaatttttaacttatcaaatacttgctgatcatgctaatacttctaaaagctacacgtctaaagttctaggacatttacgtgaagaaggcattttggaatcacaaagaaagccttggcgaattaacgatgtccagaagctccaaaagttaatagagatgaatgtaccacttgtaaagatacaaaaaaactaagagccaacttgcgctcttagttttttttgttagattagttcacttcgccaagctgtggtttttgcttgttggtatttttcaacttgaccaatagactcaaaaagttccatcttatatttcaccacttctttcgccgcatcaatacagtctgggtagattgcgttggcatcccaaagttctgttgtacttagaatctcacgacatttcttataaaaggcgtatttgtaatc

SEQ ID NO: 1995 - DNA, 1629 bp, Listeria monocytogenes-4B
tgtggctcttttttgtgatgtaatagtttgtgattataattatttattcgacccagtagtttacttaaaacgcttttttgcagaaggaccgggaaaatatacttttcttgtagatgaagtgcataatttagtagaccgtgcgcgctcgatgtattcggcgacattaaaaaaatcaacagttatgcaagtcaaacggggactagattcaaaaaagaacaaacgattgctaaatgcaataaatgtgatgaataaagaaatgattgtgcttaacaaaaaactaaaggacttagaaaaaacgacttatgtccaaaaaagtgaactcgttgattggaatgcagctgtgttaaaattcacctttgtagcgaaggaatggttgccgcaaaatactcagtcagaattacaagtggatgtgttggacctttattttgaaagtttaagatatactgccattgcggagttttatgatgagcgttacgtcacacaagttacgagaaatcacagggatttagaaataaaacaactatgtttggatccggcgttcttattatcagagaggctaaaactcggaagcagttcggtgcttttttcagcaacgcttcgaccaatagattactatacaaatgtacttggtggtcaagaagacactagtagaatgatcttttcttcgccatttaaacaaaaaaacatgcatttactagtagcggattatattagtacgaaataccaaatgcgtgaaaatagtatggaagctgtcgtggatgctctctatgctctcgtctctgggaaaaacggtaactatatatttttctttccatcatttctatatttacaaaaggtatatgatttatttaaagaaaaatatcctaacatcaggttgcaaaaacaagagactgctatggatgaaaagcagcgagagcattttttagaagattttcatgcagagaatgtagaaaccttgattggcttttgcgttttaggaggcgttttttcagaaggggtagatcttcgcgggaaccgattagtcggtgcggctgtcgttggtgtaggacttgcgcaattgaatcacgaatctgatttaattaaagattattataatgaaacgattggtcggggatttgattatgcatatcagataccaggaatgaataaggtgcttcaagcagttggccgggttattcgaggagaatcagatcgtggcgtagtgttgttaatagaagaacgattttctgccgatcgttaccgagcgttgttccctacgcactggaatcatgcgaaaacagtgaagaccacagacgatatctcccgagaagtggccggattttggcggaatagctaattttctagtagaatagaagtaattagtcattttgggaggaaattatgtataaaattatcgcgatagatattgatggcactttattaaacgacgcacacgaaatcacactagccgtgcgtgactctattaaaactgcgaaagcaaaaggggtaaaagtagtattatgtacaggccgtccacttgcaggaattaaaaaaagcttaattgaactagatcttttagatgaaggggattacgtaattacgtttaatggggcggtcgtgttagaaacagcttcagaaaaaacattagca

SEQ ID NO: 1996 - DNA, 1503 bp, Listeria monocytogenes-4B
gtgacttcgcataaagatccaattgttatttacgcaacaagtgcagactggaaatggatttttagttatccagatgagtcaattgaaacagtcaactatgtaaatattccaaccgaccgtcctgtactattcaaattaacttctgcagatacgatgacaagcttttgggttcctatttaggtggacaaaaatatgcgatgtctggcatgacgatgaatttatatttacaagcagatgaagttggtacatataaaggccgtaacgcaaacttcaacggcgaaggttttgcggatcaacgctttgatgtagtagctcaatctgaaaaagatttcaaaaaatgggcgaaagaaacaaaagcaagctcgccagttattacacaagacatatatgatcgtcttttaattcctggaagctctaagaaaaagacttattctggtacgcatttagcatttgttgatgtagcagctgatccagagtatgttttctatgcctacaaacgttttggttatgagatgacaaatccgcataatccaaacacaaaatcaaccatttctgatgaaccaatgcttccggttcgtcctgtgacagtaactaatccgcaatttgagcgtcatgatatgaagccacaaattattaaaaacggcgaaggttaccacgaggataaacaccgcgaagatgaaatgaagaaaatggaagaagacatccaaacaaatgaattcaataaaaaagaatcggatgacgcagggaagtaaaaaggggggacataaggcatgaaatggaatgagtttatcgtaactggcgacccaatgattttaggcgcgcagatttctatcgtacttgtaagtattggtgttgttgcgttactaacttatacaaaaaaatggaagtggctcatgaaagagtggatttcttccgttgatcataaaaaaattggtattatgtacttgcttgctgctgtcttaatgtttttccgtggtggtgtggatgcgctaatgatgcgtacccagctcgctttaccggatatgaaatttttagacgcacagcattacaatgaagttttttctacacatggaacgattatgattttatttatggcgatgccgtttatcatcggattgatgaacattgccgtaccacttcaaattggtgcgcgtgatgtagcatttccatttttaaacaacttaagtttttggacgttctttatgggagcgatgctatttaacttatcattcgtaattggtggttcgccagatgctggttggacaaactatgcgccacttgcgacagattttagcgctggatatggaattaacttctatcttctaggtgttcaaatcgctggtattggtacgctgatgacggggattaactttttcgtcacgattttaagaatgcgtacaaaaggtatgacgttaatgaaaatgccaatgtttacttggtcttcattaattacaagtttgatcattattttcgctttcccagttttaacagtggcacttgctt

SEQ ID NO: 1997 - DNA, 2032 bp, Listeria monocytogenes-4B
taaaaacagctatttccgaagataatggaatagatacagtgtatttaggtgcagatgttgaattgtcgggtggaattatcatcccagcgacgaaaaagacatttactttatcaggaaaaaatccagcaacaggtgaaatacatactttgacagaaacaatggcatcagctggtgcccagagcagcgtgattacagttaataccaacacaggtgcaaaagagacaactttaagagatattaatgttgtggggaaaaattattatgggacgatttcggtttatggggctgcaaaaaacgtcgtacaaaactatgaaaatgttcactatcaaggtccgcaaatgatatataatttgaatggaacggcgaattttaaaggaaccaatgatataacaatagcgtccgttgtatctggttctgcggcaccaaatgaagtcgcggaaattaaaggcgtgagcgtttccggtaagttgaatatcaatcacgcaagttcgaatgcgaatagtgctttttggttcggtggtggaacggctgaggtaaacacttttacagtggaagaaaatgcagaggtgacgatactttctaatgggactgggatgttttatcgttcagggacaaaaccaattgatatagatgtgaaaaagaatgcgaagttagctattacttctaacaataatattttccgagacacgccgggcggagctgttaaaatcgcgtcaggtgcggatgtaactatgacaaaaactgctggcgggaatccacttctatgggtggcagatgatattaccgtaagtcctgatgcccgctttatcttgaataaaacaggcggaactggctatattatccagttttataatgcgacggcgaagttagatataaatgatcctcggagctttttaattacgacaaattcaaatacgccgatgttttactggccttatgcgaacacctttaatttaaatgcgcaaatggtgaattactgggatacggttggaaccattgatcgaacggatttggcagcgcaaagttttagtttaccaaatggggaaaatgtgacggggagtttgacgtacactgggacaacgacaaaaattctgtcaacgaatgcggggatgacgccgactaattttaatcaaaacaccgcgcgaatgattgcaatggggcgacttgaaggaacgataaatcctgtgacagacgtagataatgaaattacaggaacagcgacaccaaacgcttttataagtatttcatacacagaaaatggggaaaataaggttttagaaggacaggcaaatgaggcgggaacttatcgaattgctattccaaacggttttatcaagccttacattaaattgactacaaccattaaacaagaccaaaaaaggataacattagacgatataactgtagaagatgtgactccgccaagtggtgaggctgttactcaaattatccaacttggagatccctttccagatgtagccgaattagtaacaaatatttatgatcattccgataatacatctggagcgggagttacaactactttacaaagcgcgcccgatactaatgtatttggacccacagaagccattgttcgcttagaagataaggcacaaaattacgtggatatccgtgtacccgtttttattaaagatgatgaaacagagatacaagatggcaaagcattacgagcggcggacttttcggtaaatgtaaaagatattatcgagctcaatgatgccgaactggagcaattcattttaagcaaatcgggtgcaaaagctttcaatatcgaaactggtgaggacttaagcgcggagttgaaagtagctagcaccaatttgaaaaaagagacaggcacctatgcggtcacgatgcaaattgacggattaacgaaagagattgcgattcaggttacgggtgagcttaattttatcatgtgccaaaaccatttccttcgaaacattggagctttattcacacaaaaattttcgcaaatcgaaaccgctgactttgattgtgttgagcttgg

SEQ ID NO: 1998 - DNA, 2502 bp, Listeria monocytogenes-4B
tttcaacggtaagttcaataagtccgcaaaataatgatcagcatatgaattagttaattgcgggtacaactggcggggttacagaaaacctgttcggcatgctaacggttttaaaaggtctcccactcgcttacaataaagacttgcaagaagataaggaaggcatgtttgatacgcttgagacggttcaaacaagcttagatattttcgcaggaatgattgaaacgatgaagatcaacacagaaataatggaagaatcgacacaaaaagatttttccaatgcgacggaactagcagattatttagcgaaaaaaggcgttccatttagagaagcgcatgagattgttgggaaattggtgcttgaatgtacgcaaaatgggatttatttgcaagatgtagcgcttagccactatcaggaaataaatccacttattgatgatgatatttacgtggtgctttcctctaaaactgccgtgcaaaaaagaaattcttacggcgggactggatttgatcaaattaaagttgctctcgaaaacgcgaaaaaaacattgtaaaactaactgggatgctgaatggcgttccagttttttgctgacttctccccctttttcctcttacatgatttgtcagagcactactttttttgttactattaaaaagaatgttacctttttgctaacatggggaaatagatacagagaatataaagggaagtgatgtattgaaaaaattaacaagtgttttttggggatcgggttgtcttgttttattagccgttttatttggagcctttttgccaatacaatttgaagcttttacaaccaatatccaaaaatttctaacaagtaattttggttggtactatttaattgttgtagcgattattattatcttctgcttgtttttagttttaagtccgattggctcgattcgcctcggaaaacctggtgaggaaccggggtatagtaataagtcttggtttgcgatgttgtttagtgctggaatgggaattggcctcgttttctggggtgcagctgagccgttatctcattatgcggtccaagctcctggcggtgaagtcggcacgcaagcagcgatgaaagatgcgcttcgctattcattcttccactggggaatttctgcttggtcgatttatgcgattgtcgctttagcactggcttacttcaaattccggaaaaatgcgccgggtttaataagtgccactctttatcctattttagggaaacatgcaaaaggtccaaatggacaattgattgatatcatcgctgtttttgcgacagtctctaggggtgttgcaacgacacttggccttggcgctcaacaaattaatggtggtcttacatacttgtttggcgttccaaacaattttactgtccaatttaccattattatcattgtcaccattttatttatgttatcggccatgtctggacttgataaagggattcagcttttaagtaatgtaaatatttatgttgctggagttttattagttttaacccttattcttgggcctacccttttcattatgaataacttcaccaattcatttggtgactacttacaaaatatcatccaaatgagttttcagacagcccctgatgcgcctgatgctcgaaaatggattgactcatggactattttttattgggcttggtggctttcttggtcaccgttcgttgggatttttattgccagaatttcgcgcggtagaacgattcgccaattcttgctcggtgtcatcgtgttgcccgctttagtcagtgtgttttggtttgccgtatttggtggctcggcgatttttgtcgaacaacatggaaattctgggctttcaagtttagcaactgaacaagtactctttggggtatttaatgaattcccagctggcatggtgttatcgattgttgcgatgattttaattgcagtcttctttattacttcagcagactcagccacatttgttctcggtatgcaaacgacgggcggatctttaaatccaccaaactccgtcaaagtaacatggggcctactccaagcaggaatagcaagtgtgctactttatgcaggaggactcacagcgcttcaaaacgcatcgattatagcagcctttccattttctatcgtcattatcttaatgattgtttcgttattcgtttcgttaacgagggaacaagaaaaactcggcttatatgtccgaccgaaaaaatcacaacgttctcaactataataaaaagggatgaaaatcgacaactagattttcatcccttttttcatccttttttctgctttgccgcgactatttcgcgatagctacgagtttgtttaggatatttttttcgaaagaaatgttgcgaaacaactgctaacacgagagaaatggcggtaattggaatagagcttttaaatataccgaccatcagtaataaagcactggcaaataacgttgcattaaaaaggaatttttccattagttactcctcc

SEQ ID NO: 1999 - DNA, 2144 bp, Listeria monocytogenes-4B
gctgctcgaggggccgacagtgtgctggaaagatcgcgctccgttctcgccgaacagaaacttgtaaaatcatgctcgccaatcaggcgtttacttgccaatttcatttttgaaatgtccagttcatatggataatgtagcgcaaaattccgactaaaaggatcaaaaattttcgtccgctttaccacataacgatattcttttccaactgtgccaaatctagcgtggaaatcgtctggtacttcttccactgttaaaaagctaatatcgaacggagtcatgacttgcaaagctttttgaaatttttcggcagtgatatcaagttccgaatcgaaatgaataacctgacctttcgcatgaacaccagtatctgttcttcctgatgctgtaatccgcacagtcttgcctttatgcatttttgtcagtgctttttcaatttccgcttggaccgtccgtgtattcggctgcacctgatagccataaaacccgctaccatcataagaaattatcgctttatatctcgtcatttatttcaactccgcaaccaaaataataatccacttaacactactaacgaaatcagtagcaacgtatctgcaaatcgccagcgtagtaaacggaatctcgttctccctttaccaccacgataaccgcgtgcttccattgcaatcgctaaatcttccgcacgtttaaacgcactaataaaaagtggcacaagcaacggaataatcgctttaatccgatcactccatttcccactcgtaaattcaacgccacgagctttttgcgcttttaaaattttctccgtttcatccatcaatgttggaataaagcgcaaagaaatactcagcatcaaagcaagttcatgtactggtaaatgcactaaacgaaacggcgctaaaattttctccagtccgtctgttagttcaatcgggcttgtcgttaatgttaaaagtgttgtcataaaaataatgagaacaaagcgacaaaacatcatcgctccatttgtcagtccgagtgtcgttatttgtaaaagtcctagatcgactaaaactgtcccgccttttgtaaaaaagacttgaagtaatagcgtaattaaaataagccagaaaatcggttgtaaccctttaataaaaaataaaaatggcactttcgaagttaggactaaatacaaaacatacgcaaacataagcgcataggtcagccaattgttcgctaaaaagacaatcgcgataaacgccataacagcagtgattttcgcacgtgggtcaattcgatgcaaccaagagtttcccggaatataacgtccgagaatcattttatccatcataattatgccccgcccttcgctaaataaggcgccatttcggttgttaattcatcaatggttaaacaagtttttgttaatttcacatcaaatttgcgctcaaaaagcccttggaatctcaccacatccggtacagataacccaagatcaaccagttcgtctggcttcgcgaaaatttcacgtggcgtaccgatttgaagaacagtcccagctttcatcaagacaatcttttccgcataacgagcagcatcttccatactgtgtgttacaagtactgtcgtaagccctttttctttatgaagattgtagaacatttccatgatttcctcgcggccatgaggatctagtcccgctgttggctcatctagcacaagtacttctgggtccatcgccaaaacacctgcaatcgcaacccggcgcatttgcccaccagaaagttcaaacggcgaacgtgacaaaatttcctcggtcagtcccacttcataaatcacttttttagcgcgtagttttgcatcttcctcggaaactccaaagttcatcggtccaaaacaaatatccttttcgaccgtttcttcaaaaagttgtgcttctggaaattggaacacaatcccgactttcttacgtaaatcacgtagtttcttttgctttacgccagcaacgatttctcgatcaccaactgtgattttaccttctgttggcattaaaagagcgtttaagtgttgcagcaaagttgatttccctgagccagtatgaccaataattgcagaatagctaccagaatcaaaagaaacattcacatcaagtaatgctcgctctt

SEQ ID NO: 2000 - DNA, 2231 bp, Listeria monocytogenes-4B
gatccagatgccgaatatgaccttcatatgaaaatggatgcgagcattttggaaccgtatgtcacttggggaacgaatcccgaaatgggagtgccattttctaaagcatttccggaaattaaagatatgaactatgagcgtgcttatgaatatatggggctaaaacctggtcaaactgcagaagaaatcgagcttggctatgtgtttattggttcttgtacaaatgccagactttctgacttagaagaagctgctcgtatcgtcaaaggaaataaagtgaaaaataatattcgcgcactcgtggtccctggttctcgccaagtgcgtaatgcggcagaatctatcggactagataaaatttttatagaagctggctttgagtggcgtgaacctggttgttcgatgtgtctaggaatgaaccctgatcaagtaccagacggcgttcactgtgcttctacttcgaaccgaaattttgaaggtcgtcaaggtaaaggcgctcgtactcatcttgtttcaccagcaatggctgctgctgcggcaattaacgggcactttatcgatattcgaaaggagaccgattatcagtggaggaaattaaagtacacattggaaaaacagtagcgctaatgaatgacaatattgataccgaccaaatcattccaaaaagtttcttaaaacgcattgagcgaacaggctttggcgaatttctctttgatagttggcgctacctgccgaaccgtaaaccaaacccagacttcccgctcaatgctccagatcgtcaggaagcgactattttaattacgggagataactttggttgcgggtcctccagagaacatgctgcgtgggcactactcgactaccgtttccgtgtaattatcgctggcagttatagtgatatattttatatgaattgtacaaaaaacggcgtgctccctatcgttcttcctagagaggcgcgtgaaaaattagcgaaaattgcagccgatgaaaatgtgaccattgacttgccaaatcaacaagttatcagttcagttggtacctacccgtttgagattgatgctacttggaaaaataaatttattaatggactggatgatatcgccattacatttgaacatattgatgcgattaaagcctatgaacaaaaagtggattcaatataagaaaaggtagtgaggatgatggaattagttgatttattagtaacagaagaagatgtcgaaaaggcctatgaagtcttaaaggcggtcgtcaaacatacgccactagaatatgatttttatctttcggaaaaatatcattgcaatgtctatctgaaacgcgaagatttgcaaagagtgcgttcttttaaattacgtggtgctttttatgctatttctagattatcagcggaacaattggaaaaaggtgtggtatgtgcaagtgcgggaaaccatgcgcaaggagttgcatatacgtgcaaacgaatgaccgtcccagctacgatttttatgccaacaactaccccgcaacaaaaagtatcacaagtaaaatttttcggtggtagtaatgtcgaagtggttttagttggcgatacgtttgatgcttctgcaactgccgcgaaagaatttgctgcaacacatggccaaactttcatccctccgtttgatgatcctgatattatcgctggccaaggctctcttgctgtggagatggtgaaagatttaaataaagcacatgagcaagcagattatgtttttgcaggaatcggtggtggtggcttaattagcggtgttgcaacgtatctcaaagcaaagagcccgattacaaaaatcatcggggtagaacctgatggcgcgccttcaatgacagcagctttaaaacaaaatcaagtcgtaacactagataaaatcgataaatttgttgatggcgctgcggtaaaagaagttggtggcttaacgttccaacatgcgaaagtattagttgatgaagtgacaaccgtctctgagggagctgtttgttctacgattttggatatgtatacgaagcaagcaattgttgcagaacctgctggagcacaatccgttgccgcacttgaaatttaccgtgaagagattaaagacaagaccgttgtctgtattgtaagtggcggaaacaacgacatcaaccggatgcaagaaattgaagagcgttccctcttacatgaaggattaaaacattattttatcgtcaatttctcgcagcgtcct

SEQ ID NO: 2001 - DNA, 2901 bp, Listeria monocytogenes-4B
acggtcaacaaggatgtcaaggtgaagttcacccataccggagataagagtttggccagtttcttggtcagtttcagcacggaaagttggatcttcttccgctagtttcgcaagagcttgccccattttatcttggtcagctttcgatttaggttcgatagcgacttggataactgtttctgggaattccatggattctaagataatttgttctttttcatcacataaagtgtccccagtagttgtatctttaagtcctacggcagcagcgatgtcaccagcgtatacgattgaaatctcttcacggtgattagcgtgcatttgaaggatacgtccaacacgttcacgtttacctttagtcgagttttgtacatatgaaccggaattcaaagtaccggaataaacacggaagaaagttaagcgtccaacataagggtcagtcataactttgaatgctagggaagagaatggttctgaatcatcagcgtgacgagcagcttcttctccatcaggcaatacgccgttaatagctggaacatctgttggtgctggaaggtaatcaagtactgcatctaacattggttgaacacctttgtttttgaatgctgtaccacaaactacaggatagaactcaacgttaagtgttcctttacggataccagctttaagttcttcttttgtaatttcttcgccttctaggtatttcatcattagctcttcgtcaagttcagcaactgcttccactaatttaccgcggtattcgtctgctaagtctttcagatcagctggaatttctttaatatgagggtcatttcctaaatcatcttcgtaatacaacgcgttcatttcgattaagtcaatgataccttcaaatgtatcttcggccccgattgggagttggattgggtgcgcgttggcagccaaacgttcatgcaaagtacctacagaatataggaagtctgcgccgattttgtccattttgttgacgaatactacacgaggaaccccgtaagtagtagcttgacgccaaactgtttctgtttgtggttctacaccagattgtgcatctagaaccgcaacagcaccatcaagtacacgaagcgaacgttcaacttcaactgtgaagtctacgtgtcctggtgtatcgataatgtttactcggtagcctttccattgagctgttgtcgcagcagaagtgatagtaataccacgttcttgctcttgctccatccagtccatttgagaagcaccttcatgggtttcaccaattttgtgaatacgccctgtatagaaaaggatacgttcagtagtggtagttttacccgcatcaatgtgggccatgataccaatattacgagtcttttctaaggagaactctctagccatgttgtatttctccttccataaaacaatttttcaggcaatacgcctggaatttgtcagtgatttttttaccaacgatagtgagcgaacgctctgttagcatcagccattttgtgtgtatcttcgcgtttcttaacagaagcaccagtattattggcagcgtccatgatttcgcgagcaacacgtacttccattgttttctctccacgaaggcgagcataatttactaaccaacgaagaccaagagtagaacgacggtcagcacgtacttcgataggtacttgatagttagcaccacctacacggcgagctttaacttcaagaagaggcataatgttcttcatagcttgttcaaatacttccatcggatctttaccagtttcttgtgcaatgatatcgaatgcggaatataggatagcttgagactttccacgttttccgtcaaccatcattttattaattaaacgagttactagtttcgaattataaatcggatctggtaacacgtcacgtttagcaacaggacctttacgaggcatcggatatcctcctttcatattttataagtattattttttaggttttttcgtaccgtatttagaacggctttgtcctctattttcaacaccagctgtatcaagcgctccacgaacgatatgataacgtacccctggtaaatcttttacacgtccaccacgaataagaacaacactatgttcttgtaagttgtgaccaataccaggaatgtaagctgttacttcaataccattactcaaacgtacacgggcatatttacgaagcgccgagttaggttttttaggagtcatggtaccaacacgagtacatacgccacgtttttgcggagagttaacgtctgttagttctcttttaaaactgtttaggcccttgttcaaagcaggtgatgtagattttttaattttagattgacgaggtttgcgtactaattggttaattgtaggcatgggataaattcctccttccttgtttagtagttccacacatccaggtggttcattttttcggtaaaataaaatggctgtaagttcaacctacaacgctgttttattttcagacctctgtttatagtagaggcaccttgaatatagtaacaccttgacgttcggatgtcaaggtgttacttgaaatttagttaattagctaagtccattcaaacgttgatataaatctttcgcgtagctgtcggtcatgccgcaaatgaagtctgttacgagaagtaatcgcaagtacagtttcattgtttcgctttcgccttctgcgtttttgcggtaacagcctaggttgttgtcggaaatcaacgttagtaggcgtttatctttggctgtttggcgttctggtgtttcgctgtcgtcgtaaatcacagctgggatgaacgtctcgagcatttggagatgatttcgttgcggcatttcgattaacaatgcctttcttggtatgtcgtgatgatggcttgtaaattgacagtgtcggctagataaa

SEQ ID NO: 2002 - DNA, 2814 bp, Listeria monocytogenes-4B
  misc-feature (1)..(end): n can be any nucleotide a,g,c or t/u
tagtagcatgctcgatcggccgaccgtgtgctggaaagtggtgtcccggtccaagctgatggtaaacaactagcgctcttcatacgccaagacccggaacaacaatttggggaacttcgaatatttttcgcgatgatacttattttcacatccatcatcagtattctgttggttcttattagtggcagatatattgtcaaacctgtcgtgaagttttctaatgcgacgaaaaaaatacgtaaaggcaattatgatgtagcctttgaagttcggcgtaaggatgaaattgggcagttggcagactcgtttacgaaaatggctagtgaactcaaaaaatctgaagcttcccgtcaagaatttgtcgccaatgtttctcatgaactacaatctccgctcacatccatgcaaggctttgcgagacttttaggttctggaacactaaccgaaaaagaacaagccgaatatttaaccgtgttatcagaggagacaacacgtctatcttccttaaccaaacaactactcacactcgcttcacttgaccaagaatcagagttgcgaaaaaaagagccagttcacttagacgagcagtggcgtcaattaatccaaatgaccgagtggagttggcgcgaaaaagaactaacaataaatttagacttagcagatgtaaactatacgggtgatgctgaattactttatcaagtgtggtccaatttgttaactaatgcgattaagttcacaccacagggcgggaatatcaaagtccacctttatgaaaaagcgacgtatgtttttgtagaagttcaagatagcggtgtcggcataggtaaggaggatatggccaagatttttgaccgtttttataaagctaacgaaagccgaacccgagaagaaggctcgagtggcctcggattatccatttgccagaaaattatcacgctccatcacggcgaaataaccgtgcaaagtagccccgaaaaaggcacgacattcaaagtcaaactaccaaaaaactaaatttgtaaaatccgattcacattccgtttacaaaacttctttaaactaaggataagatcttagaaggagttgaacggaatgtttttggcattaagagaattaaaacacgcaaaattacgctatattctaattggattaattatggtgttaatcgcatggcttgttttgtttgtaacgggacttgcgaatggacttgcaaacgacaatggggcagccatttcatccaataaagcaacttattatgttttacaaaaagactcggataatcgcttaacgaggtccaatttacccgcgtccgaaacacacagcgtagcgaagcgagtgaaagaatcagaaagcnccaaaaaaagagtgcaaatgggcacgatcacaccacccaacccagataaaaaaaaagacattacttattcggtatagataaaacaggcttcatgaagccggccatcacagaaggaacagagccagagaaaacaaaagaagtagtagccgatatttctttaaaagagtctggttataaattaggcagcaaactcaaagatagcgcaacaggagaagagttcacgattaccgccttcaccaaaaataacacatttagccattcaccggttatattcgtcggctgggatgcttggaaattagtgcatcaaacgaaccaagcagcagaaggagaatataacgccgtagcgctagatgtttctgaaagcacagctaaaaacctatcactcggctccatggaactttcgtctagtaaagaagtgcttcaaggtatccctggctactcagaagaacaaggatcgctactgatgatgattgcctttttgttcgtcatcgccgcatttgttctagctgctttcttttacgtcattacgattcaaaaaatcaaccaatttgggattttaaaagcagttggcgcacgaacagcctatttaggccgaagtatcgttacccaagttgttttcctatcagttgtcagtttgttaattggtaatggcttaacattcggtcttgcagcaattttaccggcgagcatgccatttacaattagcccggtacttgcaatcggctgttctgccttattccttgttgtagcagtcattggatcgatgttatcactctatcgtgtagcaaaagtagacgcgttagaagcaattgggagggcaaactaatgactttaatgatgaaaaatatttctaaaaattatcaggatggcgagcaagtcatcgaagtattgaaaaatgtatctttagaagtggcgcaaggagaattcgttgcaatcgttggaccttcaggcgccgggaaaagtacatttttatctatcgcaggcgccttattatccccaacagaaggagaaattgctataggtggaaaagtgttaaatgaccttacaagcaaagaattaacaaaagtgcggctcgataaagtaggattcattttccaaggtgcgaacctaatcccgtacttaaatgtccgtgatcagttactcgtaattgcggaactatctggtgaaaaagggcggggtgcgaaagaaaaagcagatgaattacttaaagaattaggtttaactgctcgcgaaaacaattacccggaaagtttatcgggtggtgaaaaacaacgtgtcgctattgctagaaaactgatgaacgaccccgatattattttagcggacgaaccaaccgcaagcttagatgcgaaccgtggtcacaaagtagtccaaatgattgcggatgaagtaaaacgaaaaaataaagctgccatcatggttacgcatgatgaacgagttttagacttagttgaccgcgt

SEQ ID NO: 2003 - DNA, 3036 bp, Listeria monocytogenes-4B
gacattaagtaacctctacatgctgctgcgatggggcaactgtgtgctggaaagtaagtgaagaagtgctcccggttacttattttgaagaagtcctgtttatttccagatcctctgtgctaaatcatctacgtgctattgaaggagaactttttttaaataatttagatttatcgcatcagcctaggcatggctttctagtgactggaaatttaattacgaaaacatctctttttgctagaagtttcttgcgttttattaatatccgcgaattttatcagtttttagattcggaaaatagcttatctaaaaaaggcgagttatttttttataatctttttgaactggagattttgcaggaggtgaatcgtgaggcgcattcggtggaggagaatatgacacgtgcgatggatgagcagctttacttaacgctaattgcgattttactaaagcagcatgaagccaaaccggattttcagtttacagcagattttatgattaaagatgagcttgatcaggcgttagcaacaattattgggtctttgaagcagtatcaatatgggcgtgaagatgaggcggtaattgaagcatttgtaacaggtatttgcgaaaaaatgggtgaaatttatcaagtggattttgtgcatggcgatacggattttttcacgcaaatcaaagcacacattaaattaatgattaggcgtgttcgcgccggagtcactatcgagaatccgatttttaatgaatttatgcgcgataatcgagaaatttttatgcgtgtgaaggagagtttggatgcactcaagccgttattgccgatttctgtcagctctcaagaaatttcatttttagctatttattttgcatctgaggtacaacgcaataaacaaacagttgaaatgaagccgaatttgctgattatttgcccggaaggtgtcgctgtttcaaaaatgattgcgattcagttaaagcgtatgtttgagtttgaatcgattcaaacaattggcctcagaaagttcaaacgcgcgatgatggctgattttgattttgtgattagcacagtggatttaccagatatgcaagacgcaaaagtactccggattcatagctatttgcaaaaagaggatatggaattactgcataagcatttacatgatgaaactcatcaaaagtgataaacagattattaataagttcagtaagattttagcgattattggcgaaaacacgcaaattactaatctaagtaaattagaattcgatttattggaagcgcttatatcggatgaaggtgaaacaccaaaaaggcttataccaccgtttcaatttacagaagaagcgattgttatggaagaaacatgcccaacatggaggcaggcaattaagcttggaacaaaatgtttggagcatttagaagtcattgagccgagttatcatgaaaaaatcatgcataacttaaaagcatacgggccgtatatggtcgttgcgccaggtgttgtcattgcacatgcgggggcaagtgacggtgttttgatggatggcattggagtgacgattattgaggatggcatcatgtttttcgatagatacgaggagccggttcatgtcattttcaccttatctttaaaaacaaaagaggcgcacttgatcgtggaacaattaatgaagttagcgctggacgaggaaaaaatgcataaaattaaaatggctagctcaaaacgtgatatttatcattacgttaagtcggctatctttgaatgagagagggtttcataatggacatagaaaaaatatcgttttcattaatttcactggcgggggattcgttttctaaattaattgaagccttacatgccgcaaaagaatcagattcagaattagtagaacaacttttaaaagaagcagatgacctaatgattgaagcgcacaaagtacaaacggaaatgctgattcaagaaacaagaggggagcaagcaaatttttccgttttactcgtacatgcgcaagatactttaatgaatcccatcttagcatcgactttaattcgagaaatgattgcaatgcatccagagattaacacattaagaaaacagtaggaaaagtcaatggtaatcaatccattacatgtacttttagtgtgtaacttaggcgcatctacaggggtaatggttcagaaaatgaaggaaatcgcccctaacagtgcaaagctcaaaaacacagatgtgaaaattgaggcgcatccagcaggagaattacgcgagcatattgaatactatgacgttattttagtcggtcctcaaatcaaacatcaacttaaacatttaagtgaaattgcggcggaatataataaaccaattcaagtcatcgatacgaaagattacggcactgttaatggcgcaaacattttaaaagacgcaattattcttaaactgaacaaataaaaaagtggagggaaacaacatgtcgagtaaaaacaaacaatcttttatgaaccgttttattgcttttatggagaaatattttgaacctgtcgcagctagaattgaaaaacaacgtcatatttactcaataaaaaatgggatgattgctttgatctccggtctaattattggatcatgtccggtgattatgtggaccagtcctaaatatgtgctcagtttgtcctgtcgccaaagaatcttctgtccaccctgccctcttcccttatttttactgttttccctcccgctttcgattgcctgttgtccgttcctccttccctggtcgttccgtcggcgctctttatcgtttccccggcctcctgcttcgtttccctttttcttgttgtctgttttcgcggtgaattgttttttttcttctcttgttctctttcgtatttttgtttctcttctcttcctccgccccttctccctcttctcggtttcttttctccgacctttgctcactgcccgtgcctcgcccatccattccgttattctctctttacgccttaaccctcccgtttttcctcctcttctctctctctgtgtccctttt

SEQ ID NO: 2004 - DNA, 1775 bp, Listeria monocytogenes-4B
  misc-feature (1)..(end): n can be any nucleotide a,g,c or t/u
aattttatcattctaaaggtcgcgcgagtgaaagcagctggctccggacattcaatgcttacaaacaaaaatttccagcactcgcagaaagtttgcaacaattaatggatgataatttggatacggattgggatgcagaacttcctgtcttcgatgaaaatgcggacaaagccgttgcaacccgtgaagtatcaggaattgttctacaagaattggagaaaaaactgcctaacctatttggtggcgcggccgatttggcctcctccaataaaacccatttaaaagctagcgaacggtttgctccaggtaactatgccgccaaaaatatctcattcggcgtccgcgagttcgcaatgggagcagcagtcaacggaatgacgcttcacggcggtgttcaagctttcggcgcaaccttcttcgtattctcggattatctacgttccgcgattcgttcagcagctttaatgggcattccatccactttcatcatgacccatgattccatcgcagtcggtgaagacggtccaacgcacgaaccaatcgagcatctcgcatccttccgcgccatgccgggacttcacgtcatccgaccagctgacggcaacgaaaccgttgaagcataccgctatgcctttactcaaaaagaacaaccaaccatgctcgttcttagccgccaaaacctgccaattttaccaaatagcgcagcaaaagcgcaaaccggacttgcaaaaggtgcttacatcttagccgattccccgcttgataaactagatattatcttactcgcttctggatccgaagtacacctaatgacagctgtcagagataatctcgctaaaaaaggcttcggagcacgcgtagtcagcatgccaagctttgatttattcgacaaacaaagccccgaatataaagagtccgttttaccaaaagcagtgaaaaatcgcttcgccgcagaaatgggcgcatcatacggctggcacaaatacctcggcgacacaggccaaatcctcgcgattgattcgtttggtatgtctggcccgggagatgagctagcaagacgatttggctttactgtagagaacttgacggagcttgcgttgaagcagttgtaggtatggaataaactttttaacagtaaccaatcaagtactcgggcataaaaaagcaggcattctctatttagaaagaagagaatgcctgtatttatttgactagaaatcaatttcccactttactcagcgccattaagcttagataaatcagcaagtagcggtttcccatctgcatccaaaagtggtgacattccacccgcataaccagacaaatggtaaacatattgcacaccggtttctttatcaacccaaatttccataatgttgagttttccttgggtataaattttttcaaatctttcttccattgttttccgcctcctgttttaaggttgcacgctttattccaccctaaatcaatttaatttccgaatcaaaatattgctcaataaaatgtactttctctctaatttcctctatttaaagtatcctgttttaaccaacttaaagcctacttctataaatttaaatttttaatatcaacagtttctggcattcacttaattgtaggcaattcctttttcaaagagcacatagaatttacacctaattccatagactaagaaactatttccccaataaataatctagctattcatctgtccattgttgctttccagcggcactgttgncccctcgaagagcaggggcagttcctantag

SEQ ID NO: 2005 - DNA, 2975 bp, Listeria monocytogenes-4B
  misc-feature (1)..(end): n can be any nucleotide a,g,c or t/u
cctttagtaacctacacgctgctcgagcggccgacgtgtgctggaaagcgcgtctgttgcgccttctatcgtgtcggagaaataaactaaatctttctcgtctttcgtaagtcttgcatggaggattcgctctccttgttttttgtctgctgagaatccttccagctcgtcgaaaataacgcgatttgcgtaaaaactgcttgaaacactctgttataaaaatctttttttattgtggtcttcccgcctaaagtaaagcagggaaccgatagcttgcatcattaaatcaactccattcttgttccattgtactaattttagtactaaagcgaaagcgcaagccctgggatggacttgcgctttcttctaactttatatattaatggtggacaagttagctagtttcaaacacctttgtaagcttctaggtagatttctttgagttcacttacaagtggttgtttagggttggcagtagtacattggtccatgaatgcgcgatctgcaagtgtatctacaactgcatccaagtcttttttagcaacattttgtcctttaagactcatgtcgataccaacgtctttaccaagtttgatgatttcatctacaagtgatttaacgccttcttctgtagttgctgcagggaagccgataatacgagagatacgagcataatcttcatcagcacggaagctttcatatctagggaataacgcatgttttttaggtttaagtgcgttataacgaataacatgtggcataaggattgcattcgcacgaccgtgaggaatgtggaattcaggtccaattttgtgtgccaagctgtggttaattcctaggaacgcatttgcaaacgccataccagctagggcagaagcattatgcattttttcacgcgcatctggatcaccagtaagaacagattcacgtaagttttcaatacaagttcgattgcgcggatagataatccacgagtataatcgcttgccattacggatacataagattcaattgcgtgagttagaacgtccataccagtgtcagcagtaatgtgtgctggaacagtagttacatattgtgcatcaacaatcgcaacgtctggagttagttcataatcagcaagagggtatttaatgttgttttctttgtctgtaatatccgcaaatggagttacttcagaacctgtaccacttgttgttggaattgcaaggaatttcgcttttccaccaagtttaggatatttgaaagtacgtttacggatatctaagaatttttgtttcaatccgaagaatgaagcttctgggtgttcatagaataaccacatacctttggcagcatccattgcggaaccaccaccaagagcgataattgtatcaggtttgaagtctttcattagttctgcacctttgtaaactgttacgtcagatggatctggttcaacgtcagcaaatacttggtaagctacatcgttgccacgttttttcaggtgttcgattacgacatccacgtatttgaattgaaccattcctgggtcagttacgataaatacgcgttcaacgccttccattttttgaaggtattgagtggaatatttttcaaagaaaatttttggtggaagtttgaaccattgcatattatttctccgatccgcgatacgtttaacgttcagcaagttagtcgcacttacattttgtgatacagagtttttaccgtaagatccacaacctagtgttagggaagggatgaagccgttataaatgtcaccgataccgccttgtgcgcttggtgcatttacgatgatacggcaagctttcatacgaataccaaatgctttttgaacttctttatccgtagagtgaataactgcggagtgtccaagtcctccgtatactaacatttcttcacaacgatcgaatgcttctgcttggttagcagcttcgatgaatgcaagaactgggcttaatttttcgtgagatagtgggtatttgtcgccaacacctttaatttcagctacaagaatttttgtatcttctggaactttgaagccagcttggtttgcaatccatgcaggggatttaccaactacatctgggttaagtgttcctttttcaggattgattacgtagctttctaattttttgaattcagcgcctttaacgaagtagcatttgtttgcttccatttcagctttaacttctttagcgacttctttatccacgatgactgcttgttcagaagcacaaatcataccttggtcaaaagatttagaaagaataatgtcattaacagaacgtttaatnttggctgtttgtcaantgtaagctggtacgttacctggtccaacacctagtgcaggtttaccagtagagtatgctgatttaaccattccagcaccaccagttgcaagtacaagtgctactttatcgtgattcattaattgtttcgttgcttctagggaaggtttttctacccattgaatacaatgttctggtgctccagctgcaattgctgcatcgtatacaactttcgctgctgcagatgaacaacgctgtgcacttggatggaaagcaaagatgattgggttacgtgttttgatagcgataattgctttgaaaagagtagtggatgttgggttagttacaggtgtaaccccggcaacaactccaactggttcagcaatttcaatcacaccagtttgtacatcttcattaataacgcctactgttttgttgtttttaatgagaaaccaaatatattctgtcgcgaagatgtttttaatacatttatcttcgtataatccacgtccagtttcttctactgctaattttgcaaggggcatatgttggtcaagtccggcaagtgccattgcgtgaacgatattgtctacttgttcttgattgtaactttcaaatgctttcaatgctctttccagcacagttcgccccgctaaggcagcgatgcagtatactcagagt

SEQ ID NO: 2006 - DNA, 2036 bp, Listeria monocytogenes-4B
tttttatttctagcggcgcgctgcggccgtaaggggcttctgtgcggcagccgggcggaaaaaaagaaaggggcataccaacaacagccgtgccgcctccaccaggcgtggcggcggcaaagtaaagaatggggagaagcgagggagggtcaggattgcgcttgggcgaacggcgatccagaggtacatgaactagaaaggatggcgtcacgtgtgcattcgcgcatttgcgaaacaacaatgttccatcatgatttcttgactttccgagttggtcgaggcgacgaagcaagtagcttttccgtggaattccaacaggaagagttcagccaagaaaaagacgaacttgtagaagaagctgtgaaaattaaagggcaatatttatctattaatgaagtaccagttgcgacagatttaatgcacggaccagtggggtatatcgggccgcgccgtttagtattagaacaactgcaaatgttagtaatgcaaacatcccttttccatagttattatgatttgcaatttattacgattttcccagaagaagagaaagcggattgggactggatgcgctggctaccgcatgcgaatatgcgtgatgtgaatgtgcgtggttttgtttaccatgaacgttcgcgcgaccaagtgttgaactcgctttatcaaattttaaaagagcgtaaacaagcgcttactgaacaagcgagcaaacaggaaaaattatactttacgccacattatgtggttttaattaccgacgaaaaattagtactcgatcacacggttatggaattcttcaatgaagatccaagcgaactaggtgtttctttagtgttcgtacaggacgtaatggagagcttgccagaacacgtgaaaacggtcgtggatattcgtgatgcgaagagcgggaacattattttggaacaaggcgaccttgtaaaccgagcgttcgtgccggatcatttgccagcagattttgacaaagaagtaatcagccgggctcttgcgccgctaaaccatcttcaaaacttgaaaaactcgatcccagaatccgttacttttcttgaaatgtacggtgtagagcgcgtcgaagagttaaacattgctggacgctgggcgaaaaatgaaacgtataagagtcttgctgtaccacttggcttgcgcggaaaagatgatattgttcaactgaatttacatgaaaaagcacacgggccgcatggtttggtagccggaacaactggttctggtaaatcagaaatcattcagtcttacattatctcacttggcgtcaatttccacccatatgaagtcgcgttcttgctgattgactataagggcggcggtatggcgaacttatttaaaaatatgccacatttactgggaacaattacaaacttggacggcgcgcaatccatgcgtgcactagcttccatcaaagccgaattgcagaaaaggcaacggttatttggcgagcacgatgttaaccacatcaaccaataccaaaaactatacaaacaaggaaaagcgaccgaaccaatgccgcatttattccttatttcagatgagttcgccgagttgaaatcagaacaaccagaattcatgaaagaacttgtttcgacagcacgtatcgggcgttcactcggaatccatttaatcctagcaacccaaaaaccaagtggcgtcgtggatgaccaaatctggtccaactccaaattcaaactagccctcaaagtacaaaacgccagcgattcaaacgaaattttgaaaacaccagacgcagcagaaatcacactaccaggccgttcgtacttgcaagttggtaataacgaaatttacgaactgttccaaagtgcttggagtggtgcggattacgtgccagataaggaaagcacggattatattgatacgacgatttatgcgattgatgattgacgcgccggttgatttgtgggctgatgttttcgtgctgttttcatcttcatggttattgtgttggttgggctgtgtgttttggtgcggaattatataataataat

SEQ ID NO: 2007 - DNA, 2071 bp, Listeria monocytogenes-4B
taatgccatttaccccatctttggcggtaaatattgtggcaggtctctctaaaataaaagtatatcaatttatattagcgcttgtaggtggcaaactaatcaaagtcttcgccattagctatattggctatgactttgtcgacttgattcaccagccgctcaaactggctatattagctgtttctgccggtattttatggttcgccggaaaacggctggaacattggatgtcaggaaaaaatctcaaataaaaaaatggaaagcacgcgggatgcgtactttccatttttttaataaagtaaatctaaaaattcatctttcgtaatgttaccaaagtattcttttacgtctatatctgctaaagcctcgtccaatgcttcgcgcttataagttgtattgactaatttctcctcaatatccgccacattttttacgccgaagaagtcaccgaaaaccttgatatctgtaataatccctttttgtacatttaagcgaacatcgactgctcctactggaaaacgttttgttcgtgttaaatcgaattttggagattttccgtagttccagtcccaattaccataacgtttagcagagatttcgtggattttttcccaatctgcagcagttaatttatattcttttacgtcttctactttttcaacattgaaaatataaagtaatagcaaatcgcgaaactcttccgttgtcatttcttgatccatgaaatcagaaatattcgctacacgactacgaacagacttaattccttttgattcgattttatctttacgtggttttagcgatgcagcaacattatctaggttcaaatcatacattaatgtcccgtgtgagaacattttccctttcgttgcaaattgcgcatttccagaaactttaaaaccatcaatcaataagtcgttacgcccttttagttccgcattgacgcctaaacgtttcagcgcttccacgattggttgcgtgaatttcgcaaaattatggaaagactcgccatcatcttccgtgataaaactgaaatttaagtttccttcatcatgataaacagcgccgccgccagaaagtctgcgcacaacgatgacatcatttttctccacatactctgtatcaatttcttctactgtattttggttgcgtccaatgataatcgatggcttattaatataaaataacagcacaggctcatctagatttaattcagttaaaataaattcctccaccgctaaattaatacgaggatctttctcattattattatctataaagtacatactcctaccccttttcttctatattaaaatgttttcgtgaatccttttgaagcgagtgcaatttctcctttgtaaatagccgctgcttcttgttttagaacttctaaatcgccaacttcgggtaaatgactgaggagtaatgatttcacattggcttctttggcaatttttgcaacttccgtgctagccatatgcacttttgtttttccggctaggtcatggaaaaaattggtgtctgttactaataaatctgccccctctgaaaaagggataaaactatcttgataagcgctatctgcggtgtatacgaaaactttgtcacctgcttctattctcatagcatagcaaggtaccggatggatcgtctttaagaaagttactttaaacggtccgatttcaagtctatcatctggtttatattcgattgcttttgttacatttgccatttctaaataagaataaccgcgttcatcttctttatgtccatatatcggcaatactggcggtttttcctttttttgtgataataggcgaatgtgctgcaaaatccctacatctgctacatggtctggatggtaatgagaaattattgccgcatcaatatcatcaggatcaatatagttttgcataatagaaacagcacttgcgccaacatcaattaatagcttaaatccagcttcttccagcaaataactagatgtgccttcatttgctaatggatagccaccccaatgtccaaaaacggttagtttcatcactgcacttcctttctcaaaataaacctc

SEQ ID NO: 2008 - DNA, 1627 bp, Listeria monocytogenes-4B
cgagcggccagccagtgtgctggaaagaaggtgttattatcaattaattccgtggcgatgtgggtcttttacaacccggaattgatatgattgaggaactcacaaacgtcccggttatcggtgtgattccttatgccaatctacaactggaagaagaggacagcgtttctctaagtgggaaaaattacgtgccggatagtaacgcactactggggtgtcgcgattatttgtttaccgaggatttctaatttcacagattttcatattctggaaatccagcccgacataagtgtacgctacatccgtaatatagctgattttggaaacccagatttagtcattattcctggaagtaaaaatacactagaagatatggctttcctcgaagaatctggacttaaaaatgccattcaaaactatgctaaaaatgccggaaaagtaatcgggatttgtggtggctaccaaatgctcggtaaaaaaatgctcgatccgaatcaagtggagagtaaacaattagaaatagccggacttggtttgctagataccgagaccatttttctcgaccaaaaacgcactactcaaattacaggtgtgacgcattcaggtgaagcagctgaaggttacgaaatccatatgggtgagacgaagcgaggcgagagcactagtccattttgcgaaattaaagcggtgaacggaaacgaagaaacccaccaagatggcgctatctctgtcaacatacatatcatcggcacatatattcatggtatttcccacaatgatgtttccttaggaaatctattggacgaactactaacaggtaaaaacaaatccgtttatccgcatgccatcattaatctgaaagaacacaaagaacaagaatacgacaaactagcggcccttttagaagcaaatattcaaatggaccaactagaaaaaatcatgaaaggagaaaaaatatgcgtatctacacaaaaaccggcgataaaggaatgacaagaattatcgggggtagcaaagtaagtaaagataatatccgtatcgatgcatatggaactttggatgaacttaattcgctgattggctacacgataacaacacttggggctgaaccagaaattcaagccgaactcgaacaaattcaacagcaattatttgatgcaggaggggatcttgcaaccgaagaaggcaagcgtgcgtataaattaacaagtgagcctgttgcgtggctagaagaccgaattgacatctacgccgatgaacccccagaaatagaaaaatttatcctaccaggtggaacgcaagcagcctcattactgcacatggctagaaccgtaacaagaagagctgaacgcgaaatcgtcggtatgttaaaaattgcttcaagtaacgaagaagtattaaaatacgtcaaccgtttatcggattacttttttgccgttgccagagtcgtcaattaccgcgctggtgaaacagacattttttacaaaaattccgaactcgttttccgcaataaaaagaaataataaaaaacctctccagacatcaaagccggagaggttttccttttttaaaaacgttgaattaaaaatacaccaacaagcattaataaaacaccaatcatacgata

SEQ ID NO: 2009 - DNA, 1515 bp, Listeria monocytogenes-4B
atacggcgatacggtcaaagttggcgcagggaatgttgttgaccgcgatggtttccgttatcttgcagaagctggcgcagatttcgttaaagttggcgttggtggtggttccatttgtatcacgcgtgaacaaaaaggtatcggacgcgggcaagcaactgcactaattgatgtggctaaagcacgcgatgaatattttgaagaaacaggtgtatatattccaatttgttctgatggtggaattgtttatgactaccacatgacgctagctctagcaatgggcgctgactttatcatgcttggtcgttatttctctcgttttgacgaaagtcctactaataaagtgaatttaaacggcacgtatatgaaagaatattggggtgaaggagctaaccgcgcgcgcaactggcaacgttatgaccttggcggcgacaagaaattatcttttgaagaaggcgtagattcttatgttccttacgctggatctttgaaagacaatgttgccatcagccttagcaaagtacgctctactatgtgtaactgcggcgcgctcaatatccctgaattacaacaaaaagcaaaaatcacccttgtttcgtccacttctatcgtagaaggcggcgcgcatgatgtggttgtaaaagatgcttcaaataatttaatcaaataaaataaaattggttggtgtgaatttggtaaattaccattctcacaccaaccaattttttatttatacatcttacacaaaggaatatttttctttaatatcttccatcggtagtggtcgactaaaataatagccctggaaatagtctactttcatttcccgtaatttttcgacttgctccatgtcttcaacgccttctgtaactactttcccgcctaaatcatgacacaaattgacaatcgctcgaataataatttgttgttttcgatctgtttttaaaagcgcgataaaggacatatctgttttcacaatatcaatcggtaagctgcgcaaatacgcaagcgaactataacctttcccaaaatcatccatacttactttgacaccaaggtcttttatttttcgtaagtttttatccgctatagctagttccgttatttcgcctcgttcgataatctctatttctaagcattccggatactttaaatgttctttcacataatcatgtaaaaaagtcatatacgtactgctcgctacataatgtgccggaatattaatcgaaattgaaaaacgtcctcctagctgattaatctgttttatcgctgtttcagcaacaaaatcttgcatttcccgcgttgcatttaaaaggacaatatcatcaaagaaatcaattggagacaaaatggttgttgccgtttttaatcgaatcaaaccttcaaagccaataattttattcgttttcgcgtctacttttggttgataatatagcaaataactatttctcctaattgcatcccatatttccgtacttgagatatccatcttatccctcctttttctctagttta

SEQ ID NO: 2010 - DNA, 1914 bp, Listeria monocytogenes-4B
ggtgggggggtgggcgccggggggtggggcgggtgcgagggtggggaggggggttggggcaattaagtagtagtgagagtgggggtgtggggtggagtaggagggtgcgggcggtccagggggctcggcggcgtcgggcggttgacggggtaggaaaacgggagggcgcgaggggaagggcgggggggtggggggggggggggcaggagggaggtgtcgggtgtgggtggaaatccagaggggctcgggatttaattcaggatataggcttttcccctacatctattttaagctaaattatcttaatcaatgtcccgtttacccgaagacgtagtaagtagcggtttgagagtggattaatatgaacatcacttgcatgtacacgtaatgcttgagttatcatgtgttctgtcattttttgcggcataagaacctccttacaagtcatattcctcaaaagtaaacaaaatcctttgtgtcccaatctttcacaaaaacgaaaatagtattttctaaatgcaaaagtagcatttcaagctaaaataatattgaaagtggtattttagaagcaaataagtgaataaaaaatttttttcgattttgatgattttcacaatctatgtgcaatgaataacaagcgtataattaaacggtaatatcgcaataaagcccttacattccgaaccaatatcaaaaataaagaaaatttaagctttaaaactaattatttgccgaacaatacaactcatgataagctatagaaaaggcaaatacataatagaattagcgggtgaatgtaagcagagagactgcgaaaagcggcgccgacggggaaagcatgtattatgtgaaactctcaggcaaaaggatgtttacgggacgcaactctggagtcatttttgtgttacgacagggcttatgaaccatataagcctttttgttatgtgaaaaaggaggatataattatgacagagttactaaaaacaccgattcatccactttatgcaaaatatggtgcgaaaaccattgattttggtggatgggatttaccggtacaatttgctggtataaaagcagaacatgaggccgtgcgaactgatgcagggctatttgatgtgtctcacatgggagaaattctagtaaaaggaccggatagtacttcttatttacagtatttgttaaccaatgacattgaaaaaataaaaatcggaaaagcacaatataatattatgtgctatgaaactggtggaacagtggacgatttagtagtttacaagaaatcagaaacggaatacatacttgttgtcaatgcagcaaatacggataaggattttgaatggatggttaaaaatattcgcggggatgtttctgttaccaatgtatcttcggaatatggacaattagcacttcaagggccaaacgcagaaaaaattctcgcaaaactaacggatgtagatttaagttcgattagcttctttggatttgtggaggatgcggatgtagcaggagtgaaaacaatcatttcaagaagtggctatactggagaagatggatttgaaatttatatgccaagcgctgatgcaggaaaagtttttgaggcaattttagctgaaggagtagctccaattggtttaggtgcacgggatacattgcgcttagaggcggtacttgcgctttatgggcaagaattgagcaaggacattacaccacttgaagcagggcttaattttgctgttaaattaaaaaaagaagcagattttataggtaaagaagcgcttattaaacaaaaagaagtagggctgaatagaaaactagttggtattgaattaattgaacgacgtattccgccgtccgattatccattctttctttcccactgactgtcggtccttcctattcgatctagtaccaaac

SEQ ID NO: 2011 - DNA, 1919 bp, Listeria monocytogenes-4B
  misc-feature (1)..(end): n can be any nucleotide a,g,c or t/u
atgcaacagttactgattctggttctttagaatatgctaaattgaaaccagcaaaagtaaaagcttcaattaaagaattctctaaacctcgttacggtgtagatgtacttaaacttgaagttccagttaactttaaatatgtggaaggttttgcggaaggtgaagtcgcttatacgcaagacgaagcagctcgtcattttgaagaatgctctgacttaagcccacttccatttatttatcttagtgctggtgtaacttctgaaatgttccacaaaacaatccaatttgcgaaccaacataacgtgcagtatagcggcgttctttgtggtcgtgcaacttgggctgatggtattgaagtgtatggcaaacaaggcgatgacgctttacgcgaatggcttcgtacgcaagggaaagaaaacattacttctcttgataaattgcttgatgaaggtgccgttccttggtggacaaaatacggttcttttgaagacgtacatgtagtagaaaaacaatagcatgcgaaaagcctccagttaattgaatttagctggaggctttttttattaattttgatttaaataattatacgcaaactgggcatatagctcggcgccatttttcatgacactttcgtcaatattaaatcggccatggtgatgcgcccattcggtgtctttttctggattgccgcagccaacgagtgcgaaacttccgggagcttcatcttgaaaatagctgaagtcttcgccgcccgtggttggacgttcaaagtaaagcatctcttcgccgaatgattctgtgattgtttcttggacgagtagtgcgcttttttcgtcgttgattactggttgtgtgccttgtttgtatatcatttctgccttgccaccgtagatagcggcggtttgtttggcgtagtgttcaattgattttgcgactttggcgcgtgttatgttgttgaagcaacgaagcgttccttccaaacgggcattctctgcgataacattgtagcgagtgccgacatccattttgccgatagttactacgactggatcaagtggatctgtttcgcgtgatacgatggattggggggttcataacgaatgaggaagcaattacagccgcgtcgattgtgccatgccgcattgctccgtgaccaccttgtcctttgaagtcgatttggataatatctgcggaggcgaatgtggagccgactacgcacgatatctttccacttggagtttgggaccagatatgaatcccaaacacgtggtccacgccttccatcgctccttgggctatcatagctttcgcaccctctgcgatttcttctgaaggttgaaaaatgaggcgcactgttccgggtagttcgtcttttatttctacgagtgcttttgccgcggttattagcatcgctgtatgagcatcatgaccacaggcatgcattttgccgtcttctgtggatttatatgggaggtcttggtttagttcttggactgggagtgcgtccatatcggcacgcaaggcaactgttttccctgatttcccgcctttgagttccgcgattaatccggttggttccgtgcggcggtaaggaatgcccagtttgtccaattctttggcaactttgtcggtagttctaaattcctgccattggagttcgggatgcatgtgcaaatcacggcggaaggcaatcattgcttcttcattatttaaaactgcttgttttattttctgattcattcgcgctttcctccgtccatttttttactgtttccagtacgacctcgattaatttttggagtttgtcgtaactttccagcncnctgtcggnncctcgcagcatgctgctacagtgactagtcagtcnnnnnnnnacaaagnaaaagcacaanancaaccttccancnnnngcgcccggc

SEQ ID NO: 2012 - DNA, 2360 bp, Listeria monocytogenes-4B
taagccgtttccgaacaaagaaacaacaaacagaaacattaaagggtatgaaaaacggcacagtcgacgttgttgttggtacccatcgtttattatcaaaagatgtggagtatcaagatttaggcttattaattgtcgatgaagaacaacgattcggcgtaactcataaagaaaaaatcaaacaaatgcgttccaaaatagacgtactaacacttactgcaacaccaattccaagaactttacacatgtccatgctcggcgttcgtgacctctctgttatcgaaactccgccagcgaaccgttttccagtgcaaacatatgtggcggagcagaataacgttttagttcgggaagcaattgaacgtgaactagcgcgcgacggacaagtttattatctatataatcgagtggaatccattacgcaaaaagcagatgaaatttctgcgatggttcctgatgctagggttgccactgcgcacggacagatgggtgaatcggaattagagtctgttattttaagtttccttgaaggggaattcgatgtacttgtaacgacgaccatcattgaaaccggcgtagacattccaaacgttaatacactctttgttcaagatgctgatcggatgggtctttcacaactttatcagttgcgcggacgagtagggcgttggaacagaatcgcctacgcttacttcatgtatcaaaaagataaaatattgcgtgaggaagcggagaaacgcttatcggctattaaagaattcactgaattaggttcaggtttcaaaatagcgatgcgtgacttatctattcgtggtgccggtaatatcctcggagcgcaacaacatggctttatcgattcagtcgggtttgatctctactcgcaaatgcttaaggaagcaattgaggcgaaaaagccaaaagaagaacaaaaacaaattgtccctgttgaaattgatatccaagcagacgcctatattccggaatattacattacagacggccgccagaaaatcgagatgtacaaacgcttccgcaatattgaaacgttaagcgaactcgaagatttacaaagcgatatgattgaccgttttggtgaatatccagaagaagtagaatatctattccccctgacagaactcaaagtccatgcactcgaagttggcattgagtccgtcaaacaagaacaaaataaaattaccatgctattttcagaaagcggaacagcaggcattcgcggagatatcgtcatgcaaatcattggcgaatttggccgaatggtcggtgtgggtatggaaggggacacgactaaaaatcgcgataaacgtccagaataaacctttaaaagaatggttataccaagtcgaaagttgggctgaaaaacttcgcggagccatgaaagaaagagcatctgcagaaaattgataagttattaagaaggaaggaggtggcggagtgccagaacgttccatgaagcgactaatgaaaggagcggcttggctaaccgcggcctctcttatttctaaaatacttagcgcagtttaccgagtaccctttcaaaatatggtgggggatgtagggttttatattttccaacaagtatatccgatatacggaattgcaatgaccctcgcactcggtggattcccagttgttatttctaaaatgttagcggaggcagaaggcgatgtaagacgacaacaaataattatgcgcgcagtctcacggatgctccgaattgtaagtattgtgattttcgcctttttattcctatttgccaacccgattgctatcatgatgggagacccggcattatctgaattaattcgggtcatcagtttcgtgtttttacttatgccacagcttgcgtttatgcgtggctttttccaaggagaaggtgacatgattccgaccgcaatctcgcaaacagttgagcaaattgttcgagtagctattattttgataggtgctggccttgcacttcattttaattttgatttatatgatgcaggttcaatggcgatgagtggtgcctttttcggtggggtttccgggattttcattttgcgtcatttttataataaaaaggtaaggctcggggaagggattcaaccagcagtatttacaaataaagaagaaaaagtaggtattggccgcacgttcttgcgacaaagtgttgcaatttgagtagatagctccatgctgattatattgcaattgggcgattcttgccgagttgtggtgcgatgagtgactcgtggatggcggatccgatccctcacgcgtttatggggtgtgcgtccgcttcctgtctttgtggcgctcgtgcaataccgttccaactgtgcatacgctcccactca

SEQ ID NO: 2013 - DNA, 2974 bp, Listeria monocytogenes-4B
  misc-feature (1)..(end): n can be any nucleotide a,g,c or t/u
tctccatcagtgtgctggaaagcttggagcgaatctatgaatgggaaaatgtaaaacgtggcccatatgctggtgcggttggttatttaactaaaaatggtgattcggatttcgcgctttctattagaacaatggtacttcataacggaaaagcttatgttcaagctggtgcaggaattgtctantgattccgatccatttttgcgaatacttagaaacattacaaaaagcaaaggcacttttggaggtgggagaatgattctattaattgataattacgattcttttacatttaatttagaacagtatttagcagaatttagtgaagtggttgtgaaacggaatgatgcgactgatttaatggaaatggcggctttagctgatgggatagttctttcaccgggaccaggaaaaccaagtgatgctggtcttttagaagaagtagttgcaaaatttgcgaaagaaaagcctttgcttggaatttgtttaggtcatcaggcgattggtgaggtattcggcggagacgtaaaaagagcggcgaaaatccgccacgggaaagtttctactatgcggcaaaccgctggagcaatctttgctaatttaccggaagaaatgcctgtgatgcgttatcattctttaatagtagataaaaacacgttgccacaagttttggaagtgttagcagtagcgacggacgatgcggaagtgatggcaatgaaagtaaaagattatccggtttacggtttgcaatttcatcctgaatcaattggtacgaatgatggaaaacaaatgatggaaaactttattcatatagtggaaggagcgcgagaaaatggaaatcttactacaaaaagtatatgaccaagaaaatttatccaaagaagaaatgacaatgatcgcaacagaaatttttgaaggacgactttcgaaaacgaaaatagctgcttttttaatggcgctcaaagtgaaaggagaaacggcagaagaaatggcgggaatcgcgcaggcgatgcaacgagtggctattcaagtggcttttccagccgggacagcgatggataattgcggaacaggtggagataaatccaatagttttaatattagtactacgtcggcttttgttcttgcggctgcggggattccggttgcgaaacatgggaatagaagtatttctagtcgttcaggtagtgctgatgtttgtcaggaattagggattgatattaatatgcgcccagaagatatgacttatttactcgaaaaagtcgggattgcctttttgttcgcgccacatgttcacccgaatatgaagtacgttatggatgttcgaaaagaacttggaacgccaacgatatttaatttgattggcccactcacaaatccggtccatttagaaacgcaattaatgggaatttatcgtcgtgatttgttagagcaaacagcggaagtactcggccagctcggacgaaaacgcgcagttgttttaaatggcgctggttttatggatgaagcttctctggctggagaaaatcattatgcgttatatgaaaatggtgaagttcacttatatacactgcgtccggaagatgttggtttaactagctatcctctcgaagcaattacaggcggagaagctaaagaaaatgcagcaattttgcgtagtgtgcttgacggagaaccaggagcttacttagatacagtgcttttaaatgccggatttggtttatttgcaaatggcaaagtgacaacggtacaagaaggcgtggatttagcaagagatttaattagaagtggtttagccaaacaaaaattggcagatttaattacttatcaaaaagaggtgctagcaaaatgacatttttagaagaaattttagcgcaaaaagcagtagaagttgcagacatgcccttagaaaaagtagccgaaaaacggaaaacttattcgttttatgaatttttaaaagcaaataccagcacgatgcaacttattgcagaagtaaaacgcgcctctccttctaaaggggaaatcaatatgggcgtgaatccggttctgcaagccaagtcttatcaagctgcgggtgcaggaatgatttctgttttgacagatcctgtttttttcaaaggctcgattgaagatttgcgagaagtagcgaaaaatgtcgaaattcctgtactatgtaaagattttattattagtgaaaaacaattgattcgtgctcgaaatgcgggagcaacggttgtattgctaattatttcggcacttacagaagagatgctaattgctctgtttgaacaagctctggcgcttgatttggaagtgttagtggaagtacatgaccagaaagaattagctgttgctcaaaaaattggagctaaactcattggtgtgaacaaccgtaatttgcatacatttgaagtggatattgcagtaagtgaaagactggcgagcgatttctcgtcggatgcttgtttcataagtgaatcaggttttcgaacagctgaagatgtggctcgggttagtcaaaaatataatgcagtacttgttggagaagcgctaatgcgagaagcgactccagaagcagcggcgaaaagtttgaaggtgacacgatgattgtaaaaatttgtggattgaaaaaagcagtagatgtagcggctgcggtcgataatggcgcagatatgattggcttcgttttcgcaaaaagtaaacgccaagttacggtggaaaaggcacatgaattagctaaaaatattcccgctaacgtcaaaaaagtcggggtattcgttaatcccactgaagacgagttaaaggcagcaatcaaaggtgtgccattagacattgtgtaacttgccgggctagaacccgcgaaacacgccattgcggcaggtgccgaagttgtggaagctgtggctgtgaaagatgggatcttgcctcccatgtgagtgactgtccgaccgtggtgttaagcttaaggaggaag

SEQ ID NO: 2014 - DNA, 1671 bp, Listeria monocytogenes-4B
gcctgaattagatgatgatattgaaattgaagtacgtacagaagacttgaaaattgatacgtaccgcgcaactggtgcaggtggacaacatatcaatacaactgactcagctgttaggatgacacatattccatccggcatcgttgtaacgtgccaatctgagcgttctcagcttaaaaaccgtgaacaggcaatgaaaatgttaaaaacaaaattataccaaaaagaacaagaggaaaaagaacgcgagctagcagaaattcgaggagaacaaaaagaaattggttggggaagccaaattcgttcctatgttttccacccttactccatggtgaaagatcatcgcacaaattacgaaaccggtaatattcaagcggtaatggatggagacttagatgaatttatcaatgcatatttgcgttctaggattggataaaagagatggcaaataaaagaaagaaacaaccgttatccccagttgtttctaaattaattgagtatatttatgtcattataggtgcagctctcatcgcacttgcttttaatgttttactactcccgaatcacgttgcttctggcggagtgagcgggataagtacgatcattaactatttaacaggttggaatcctgcttttattcagtgggcatttaatattcctttatttctagcgggattattctttttaggctatcaattcgggttgaaaacttttgtcggcacgatgcttttaccgttctttgtgtatttaacgcaaggcttggagccatggacgcatgaacctcttgtagctgctttgtttggcggcgtacttgtaggaatgggacttggaatcgtttttcgaggcaaagcatctactggtggcacggatgtcgctgcacaaattttgcataagtattctcatctaacattgggaatttgtgtggctttgattgatggattcgttgttatttcggcaatgtttgtttttgacattgaatcagggctgtacgcacttgtcggattattcgctacaagtaaaacaattgatttggtgcaagttggtttaaatcaatccaaaacagtctttattatttctgaaaatcaagaagcaatccgccaagcaattctgtttaaaattgaccgaggcattactcggctctccgcaaaaggtggatatacagaggatgacaagcaaattttattatgtgtgattgcgcaaagtgaattttcaaggttaaaagaagttataaaagaaatagacccagaggcttttgtggttgtaatgagcgcaagtgaagtaatgggtgaaggttttacttcataaaaaagtaccatttcctaacttttttagtcaggaaatggtactttttttaagttttcaggcccgctttttgacaatttgatgacaggcgagtttagcctagttgcagacctcgagctattttaactagattggtctattccgctagctagaactgtaatgatttttaatgtacctgtaatgttatttagggtaaaaacaagttacaatgttagcagtagaaaagaccaatgtgggttcttttttattttgtcttaataacactagaccgcagacatatatataaattggaaatcaacgtaataatcgtatttcctattacaataatcgagatattgtcacaccctgaaatataattgtaatgcaata

SEQ ID NO: 2015 - DNA, 1865 bp, Listeria monocytogenes-4B
tctgaaatggcctcaaaagcgtgcgctgggctagaaggaattatggatgatgtgccgcaacgagaactaaatatgacgccttatgaaatgttgctttctgaatcgcaagaacggatgcttctatgtgtgaaaaaagggcatgtggaagaaatccaagcgttatttgaacgttatggtttagaggctggggggattggtcaagtaacagatgataaaatgtacaaaattattcatcatggtgaagtagttgcgaatgttcctgtagatgcgcttgcagaagatgcgccagtttatcataaaccttccaaagagccagctcgttatcaagctttccaagaagaggaatcgtttgtgccagttatggaagatgtggtcggtgtttggaaggaactgcttgctcagccaacgattgctagtaagcgccatatttatgagcaatatgattatcaagttctgacggatacagctgttgtacctggttcagatgcggcgattgttcgtgtgcgtgggaccgagaaggcaattgccatgacaactgattgtaactcacgctatttgtatcttgatccagaagtaggcggagcgatagcggttgcggaagcggcgcgcaatatcgtttgttctggcgggaaaccactagcgattacagatggactgaactttggaaatcctgaaaaaccagaaattttttgggaaattgaaaaagcggctgatggtattagtgcggcttgtttagaacttgatacgcctgttatctctggtaatgtatcgctttataatgaaacagatggtaccggaatttatccaacgccagtcattggaatggttggtttagtagaagatttggcacatattacgacacaagattttaaaaatagtggcgatgtgattttcttaattggtgaaacaaaagctgaatatagtggttcggaattgcaaaaattgcaacaagggaaaattagcggacgtgcgccggaattagatttaacgacagagaaaaaataccaacaattacttctaacggcgattcaggaaggtctagttgcttctagtcacgatttggcagaaggtggatttggtgttgcccttgcggaagcgacttttaaagcagggcttggtgcggatgtagaagtaccgtttgagttgaatcaactattcagtgaatcgcaatcacgtttcttagtatcggtaaaaccggaaaacgaagcagcttttgcgcaattaatggaactggaaaaagtataccgccttggtgtagtaaccgaggatgatacgattcgtgtgaaacataaggaagatcaagttacagcgaaaacaacggaattacgatccatttgggaaggggctattccatgcttgctgaagtaaaaggacttaacgaagaatgtggtatttttggtatttgggatcatcctaatgcagcggaaatcacctattatgggttgcatagtttacaacatcgcggtcaagaaggtgccggaattgtttcgacagacggtgaaacactaaaaggtcaccgaaatctcggccttttagcagacgtatttaaacatggtgaactagacgatttaaaaggtaaagcagccattggccacgttcgatatgcgacagccggtcaaaaaaacttaggaaacgtacaaccatttttatttcactttcatagttcttctttagcacttgcgcataatggaaatttggttaatgcgaaaagtttacgccgtgaactagaagaagaaggcgctatttttcaaacgagttcggatacagaagtgttagcgcatttaattaaacgtagccatacaggtgattttgtggaagatttaaaagttgctttgcccaagcgttaagggtggcattgcgtacat

SEQ ID NO: 2016 - DNA, 1850 bp, Listeria monocytogenes-4B
gcactagtcacctacagcatgctcgagcggcctacgtgtgctggaaagatgcgtaattcttggcggattcgtgacgcaaaatgagccttttttccaaaagatactaggtaatcttcaaagcaatacaattcgttttgttacaaaaggtgttgtccgctctaagcttgagaaggataaggttggcttaattggtgcagccgttattggaatgagactaggaaatgatttgtaggaaaagaatgaagccaagtatgaaacgacaaattgcgcaaactggtattattcatcgaccactccctattgaaaccaagcatgcgttagaaactttagcgaaaaagaaacaagttttatcaagtaggactttatttagctctaaacaacatgtttctttagagtttgcacatcaaggagcaggagattttactatttctgaccaagatgaaatcaagctttcttcgcctgtggttatgccgcattggcccgctggtgctcccgatgacggtgattatactaattttggttacgttaccatatcggccccgattgaaaatgaggactggagcggctttaatcgtgtgcgaatccaagttttccctgattttcctggagtaacaaatccctatttaatgattagttttaaaaacgacgggagcgtgaaagtgcctgatatatatgggcgagaaggtgttcacggtgtgaatttaatcaaccatgaatggaatgatgtcatttttgaaattgaaggtttgccgcgtgaccgaatgaccgaaatgagttttagttattacttgaatggcccagagcgattgactgctggaacgatggaattattcattaatgaaattaaattagaacaaatcagtgagccggaaatctccaagggttggattccgcaagataatacgctagtttattcgcataacggttactctaagggcatgcccaaagtagcgttttgcgccaacaagtttgcagcgacttcctttacaattcacgacaaagaaacagacaaagttgtttttactggaaaaagttaccaaaacgcaacagaaactggcgatttcattattcttgatttttctgatttacaaactgtgggtgaatactatttaaaatttgcggatatgcaaacggaaatttttcaaattgggacttccgaagtgatctgggaatcttctatctggaaatcgcttaactttattttctgcgaacgatgcggttgcccggtttttgggaaacatacgacttgtcacgcagatattatcgctgaacacgatgggaaacagttgtcatttaatggtggatggcacgatgcgggcgatgtttcgcagcagctcattcaaacggcggaagtaacgatggctttatatgaaatggcttcgagtttacctgaaaaagaggaaatgttgcggatgcgccttttagaagaaggcgagtggggactagattttattttgaaaacgcgcttcggagacggttttagagcgactagcgcaggtatgacgagatggacggatgggcttgttggtgggatggatgatgcaattgcgcgcgttcataaccaagcttatgagaacttttattgtgctgggattgaagcgtatattggcagccaaattgcggataatgctactatgcagaatcatttgctgagaatcgcggaagaggatttactttttgcgataaaggaactggaaaaacacggaacgagccaaaagccgattttctgggagcatacgtatcaaacctcagaaagtctatattatgcgcctgcttcttgggcagcttcgatggtttatcaactaacaaacaaagaaatatatgcagaaaaagcggccgaatggttatat

SEQ ID NO: 2017 - DNA, 2020 bp, Listeria monocytogenes-4B
  misc-feature (1)..(end): n can be any nucleotide a,g,c or t/u
tccattcgatgactagaaaaaataatagcagcccctgaagcgcgtaagtcaaatacaaactttttgagaatttctgcattgactgggtctaacccgctgaatggttcatctaagataactagttttggttggtgaataattgtacttaaaagctgaattttttgttgattgcctttggatagtgttttgatcaagtctgtttttttaccgacaatttcagcgcgttctagccagctatcaatttctgcctttattttttgttttggatatccttttaattcagcaaaaaatattaattgttcttcaattgtgacatttggatataaaccacgttcttcgggcaaataaccgataatatttggatcgattttgcttacttctttgccgtcccaagtgatttttccagaagtagcttctaaaaaatgcaaaataaggcgaaaagtagttgttttaccagcgccattttgaccaattaatccgagtatttttcctggttctactcgaaacgataaatcattgacagcgacttttgttccaaattttttcgtaacattatgtagttcaagcgtcacacgagcacccctttctaattgttccctgtttttattatacggttttattggaggattgtcttgctaaaagtaaagagctacgacgacgacttttttcacaaactcagccaaaaaattgtctagtgtagtggacataacttgttgtaaccgttttcttttatttgtgtataatagagcgtagagggaggtgatgaaatgcttctaaccaaatcggagcatgcattaattaacttgttcttaacgaaaaacgattttttgacagcaaagcaattagctgaaattctagacgtttcctctaaaacgatttatcgcaagattaaaaacatcaatgagacaactggaagaaaggatatcatcatttctgaaaaggggcgtggttttaagttagattataaagcttacatacaagctaaattagaaacgacaggtgatatttttggctatacaccaacagaaagacgtgaaaaaatcttgctgcaagtattgtttaaatcaccaaagtacttgaatgtaacagagctgtatgaagattattatgttgggtataattcaatcaaaaatgatttctctcttttaaatcaagccatcgagaaatatgatttggctcttgaaaaaaggcaaaaagaaatacgggttgttggcactgaagaaaacatccggaccgccattaatgaagtgattaacaacttggatttatcgacctatgatgatttgaaaacagaatacagtgatctcaataaagctgacgttcagtttattgtgcggcaaatggagttgattgagaacaagctgatgattagcattccgtatccgtatgatattaatatcttttcacatttgtatattttaatcaaccgtttccgtcaaggggaagtagaagattttaaagaaagtgatgatgcttatatcgtcacaaatgaaaaattgcatacgattgctgtagaagccattgatgcaattgaacaatatttgagaatgaagctaccggagagagagactttccattttttacaaggcttgatttcttctcgttttaaccatgaaatcgaattagttccaggtaaaattttaccgattgtggaagagatgactgatttttatattgaacaagtggctgctaaaattaatatgccgattaataaaaagcaattaaagatcgagctattgagccatatgaagccaatggtaaaccgaatgaatcatcaaattaatataaagaataatttgttaagcgacatcaaattagagtatggcagactatttgaaatcatcaaagaaactgcaaatgatgtagcaaaaacctttaaattaaatacaatttctgatgataaagttggctatattnccataatttccagcncntgtcgnncgctcgagcatgctgtagagtngcatacaatntnncnaaaaaantcataggcagtgnnccctngcntaagtggcccccc

SEQ ID NO: 2018 - DNA, 2189 bp, Listeria monocytogenes-4B
  misc-feature (1)..(end): n can be any nucleotide a,g,c or t/u
atccctaattttcatttctcatttaacaaaccatatgttgttccagaatattgttttgccattgatttaacgagttgttcatatcaggttacattatctttagagcatagcgagttgcgctgggtttcttacgagtctgctgttcagttattggagtgggatagtaataaaacggcgctttatgagctaaatgaacggttgaaaaacaatgatatgaaggcaatgtaaaaaaggctgaaactcagccttttttcttaacttgggattaaactgtttagcacgtgcgcaatgccgtcttcattattggataatgtaacagagcttgctgcggcttttaattcagggacggcattttgcatagcgattcctgttcctgcatattcgaccatggtaatatcattatgtccatctccgaatgcgataacattttcagcgtgaatgcccatcggtgttaaaacggtatcaagtgctttggctttatcaatgccctgagctgtgaattcaaagtaaaaatcagctgtgaagacacaattaagtgtatctttgaaaggggccatcattgcttgataattttcttgcatataggccgggtcgccagctgtgagaattttatttagacgataatctaaaaatgcggctaaatcatctttttcacagagtttgaaattcccaccgcgagattcgtactgaacgatatttattacttcgccgcggtaaggtacgtagcagtcatatacatcattcgtgtacatataatcctctttatcaatcattactttcacttcaaattgtttcatgtgttctaaaacggcttttccttcttcaacagtaagtgcttggttgaataactcttcacttgtcgcgcaatcaactactttagcgccattgtatgaaacgagcaaaccgtgatgcttttccatttctaattgttccgcatatacgtgcattcctgtggttggtctaccagatgcgagaataagtttaacaccattctcttgcgcggtgatgagtgctttttttgtttctggtgagatttttttgtcgtcgttcaataaagtgccatcaatatctaaaataatcgcttgggttgtcatgtaagtttagctcctttttttctttattgtatcactagaaattaagaaaaaatcagatgtggcgcatattgagagctttttttcaattcgaaaggaaaatggctgtgtttttgaaaaatcattccaattcggtgttcattttttggtaattagtcgttttgtattgaatgtttttttcgtaattttgattaaaataaatggaataaagcgtatcgaaaatgcttagtaaagattggcgcgttgagaacgaagagactttgttgtaatggttctcagcggatgccatgtagattttgtgtgtggcaaattcgactaaaggattgtcttgcatagatgtaattaaaataatatcgacattgttttcggacaagattttgacgactctttgaagcgtccgactccgaccgccgtaagagacgacgatggcaatatgattttcatcgctgttggcggccgataagctttgcatataatcttcttcaggaacattgactaaaacaccgatttcctgcatttggaatttgaagttttgagcaaaaaataaatggcggaagctgcataaacatcaatggttttcgcttgaattaatttttcaccaattttgacaagttcttctggatcggcgttgtttaatgtttcatcaatggttcctttgtatatttggtttaggttggtcattatttggtagggtgtatcggattccaaaataggataatcgtaatttaaatctttttcttcatttgtttcacggagactcgaggcaatttcgattttcagttcaccgattccgtttagtcctagtttgttaattaaacggtagatagttgcagcggagacaaaggcacagtagctaattcttttcgtttgcactgtaatgtttttttcgggttcgctaaaatataattcgcaagttctttttcactattggttaaattggttagttcgcgtatttaattaaaatattcatcgtttcaaatcctaactttttagaatggaatgttttaaaaacacccattaaataaaaaatcccttagcaagtgcacttcagccactgtcggcgtgagcagctccagtgcatagcnnnaaaaaataacc

SEQ ID NO: 2019 - DNA, 2810 bp, Listeria monocytogenes-4B
ggcatttgcaacgggcctgctcgacgccgacagtgtgctggaagttccggcactgggccattaatatatgattataatggtgtctttgctgaatttgtgatggctcttgtgtgccactgaccattacttctccacttttgtcttttgctcggctattcttcttctgcacgttgttttgtttttcacgcgatcaatatcaatatcttgctccgttcagcacttccgcgagaatattaacttcttaccgttacttccatatagccaccattgcagcgacccatgcctcaccagactcacttttaaactagcgatgtcgattttaagcggacacctcctggaacatggccaggtaaaataccgagttcacctgcttttgttctagcaataaccatttgagcaacgccttcataaacagggccgtctggagtaacaatactaacatttaatgaacccatacgtatttcctcctgtttttatcagacttcaacgcccatgtcttttgctttttcaagaacatcctcaatgcgtccaactgaacggaatgcatcttcaggaatatggtcgtattttccggctaataggtctttgaatcctttaactgtttctttaacaggaacataagaacctttttgacctgtaaattgttctgcaacgtggaaattttgtgataagaagaattgtacacgacgcgcacgggaaacggattgtttatcttcgtcagataactcatccatacctaagattgcgatgatatcttgtaattctttatatctttgtaataaacgctgtacttccgttgctactgcatagtgttcttctccaacgatatcaggagaaagcgcacgagatgtagaagcaagtggatctaccgctggataaataccttgttccgttaatttacgttccaagttagttgttgcatctagatgggcgaaagttgtagccggagccgggtcagtatagtcatcggctggtacataaatcgcttggatagaagtaacggatccaacgttagtagatgtaatacgttcttgtaattgacccatttcagtagctagggttggttggtaacctaccgcagatggcatacgacctagtaaagccgaaacctctgaaccagcttgtgtgaaacggaaaatattatcaatgaataaaagtacatcttgatgttcttcatcacggaaatattcagcaattgttaaaccagttaaggcaacacgcatacgcgcacctggtggctcgttcatttgaccgaataccatcgctgttttttcaataacaccagaatctttcatttcaaagtaaaggtcgttcccttcacgagtacgttctccaacgcccgcgaacactgaaataccaccgtgttcttgtgcgatattatggataagctcttgaattagaacggttttacctacacccgcaccaccgaacagtccgattttaccaccttttaggtatggcgctaacaagtcaactactttaattcctgtttcaagaatttctgttgttgttgctaattgatcgaaagttggagcttcgcggtgaattttgttacgtttaatatcgcttggaagtggttcgtccaaatcgatggtgtttcctaatacattaaatacacgaccaagagttactgtacctacaggaactgtaattgggctcccagtatcaataacttccatacctctttgaacaccatctgttgatgccattgcgattgtacgaacaacgtcatcacctaattggatggctacttctaaagtaagttggctagttggtgcttcttctgcatcagatttatattcaataactagggcattgtagatttcaggtaagtttccaccttcaaatttaacgtctacaactggacccataacttggattacttgtcctttagacatgcaattattcctcctcacttaccttcccatttattgggacgttacaagaaacgccgacttctattctagtgcggctgctcctccgacgatttcggtaatttcttgcgtgatcgcagcttggcgagcacggttatattgtagtgataagtcactgattaaatcggatgcattgtctgtcgcgcttctcatggctttcttacgagcagcatgttcagcggctttggcatccagaagtgctccgaaaattaggctttccacatattgcggcaataatacttccagaatttcttgttcggaaggctcgaattcgtatgtagttaaatctacatctgtttccttacctttttcgtgaaattctgtcagtggtagtagttgctcttttctcagttcgctagaaatagaattaatatggtgattataataaatgaaaacctcgtcataaacaccatcttcaaacatttgaactgtgttactagcaatatctttaatttccgcaaatatcgggtgatctgtaatgccttgtacttctaaaaccacgttcatttggcgcgctttgaagaagtctcgagcagatctacctacagtgattattgcatattcatcacttgacgtatgctttttattaatttcttgaaatacttctttgattacagaactattgtaagaacctgcaagtccagtatcagaagtaagtacgatataaccagtacggtgaacaggtctagatacaagcattggatgatcaatactgttaccagtgctagcaacatgtgttactacgtctttaattttagaaacgtaaggctcatatgaacgagcgtttgattctgcacgacctagttttgctgctgaaaccatttgcattgcttttgtaatttgacttgttttacgtgtagaagttattcgttgttt

SEQ ID NO: 2020 - DNA, 2735 bp, Listeria monocytogenes-4B
acgggcggccactattttttttttacaagtcgaagacgcggggggggggggaggggcggagcggaccggcggggccaaggccgaaggggcgcgagcgcggccgggaagaagggacaggagaaaaaaagaaaaggggaggacgacgcgggacgaggggcgggggggacacgcaggcgaaaccggggcgcgcgggagggcggaagggaggaccagaagggaggcaaccacacagcccagggggaccgccgggggggaagaggcaggggaggggcgcattgcgccgggcaggagagggcggcgccgcaggagggggcagcgggaccggcgtggaactttcatggagcacagggcgcagaaggggtcgcaccgtttaataccgggtttttgctaccaaatcaaaaaatcatccatacgacgaaagtaaataatggcagtgcatttgaaaagtctccgtatagcgtggcgaacgatttttatgcgactacgactgaagggagaaccttcccggtcgatatcgcgataacctatcccttctttgataacgagaaagaattaaaagcagctgctgaggaactagcgaacgacaatattagtgattttagattccaagatcatggggtaaaaacaaataaggatacgattgaatcgagtgcaggctcactttatatcaataatcaatccgttacgctcgatggcgatttaaactatattaaaacgaaaaataaaacagtcaaacaggcgggcagtttagaagggttcttcggctatcaaaacacctttttcacgatagtaattgtactttcacttggcattattggggttttatttgtctttggataccggctttacatgaaaaaatatatgaaatgaggtgaaataaatggttattgcagattatttagcattattcgcggtggtgtgtatttggggacttttgctaattaatatagtgttaattgttgcaggatatgtttattatttgaaaaatgaagcgcgaaaagtgcccgaaataccagcggaagtaccatttgtttctgtcatggtgccggcccataatgaaggaaaagtaatcgtgaaaacagttgaatcactgcttgcttttgattatccggtcgatcgttacgaaattattgtcattaacgataattcttcggataatagctcggaactcttagccgccattcaagcaaaaaatccaacacgctttttaaaaattattaataccgataatattacaggcggaaaaggaaaatcgaatgcgctcaatattgggtttgcggaaagtcgtggggaactggtggcgatttatgatgctgataatacaccggaacggcaagcgctaagaatccttgttggtgagattacaaatgatgcgaaacttggtgcagtcatcggtaaattcagaacccgaaatcgaaatgcaagctggttaacgcgatttatcaatattgaaacgcttagttttcagtggatggctcaggccggcagatgggcccttttcaaactatgcaccattcctggtactaattttattgtaagaaggtcgctcctagaagaaatcggtggctgggatgtgaaagctgtcgcggaagataccgagattagctttcggatttacatgatgggttaccgaatcaaattccaagcgaaggctgttacgtgggaacaagagccgcaaacattaccagtttggttcaaacagcgctcaagatgggcgaaaggcaatatttatgtaattttaaaaaacgttccactccttttcaaacgagaaggtaggcgcgttcgctttgatattttatactttttatcgatttactttttattattaacttccttgattgttagtgatgttttactcgtattatatgcgcttggacttgtacatacaactcttgctggccttagcggggcactttggttgctagccattttactttttgtcgcaggtacttttattacactcaccacggaaaaaggcgaaatcagtttttcaaatttgttatttattatgttgatgtatgtgacgtattgccagctttggatggtggtcgccgcatatggattctttattttcttaaaagataccgtactaaaaagggaaaccaaatggtataaaaccgagcgtttctaaaaaggagagtgcctaatgaaaaaattaactgtaatcgggttgcttatgttcgccgtactatttctgtataggccagacgttctcgcagcagataaaaactatcaaacggtttttggaacagataaaaccgcccaaggaaaattcacaaccaccaaacaaaacttcacggtggaaaactactgggatgtatcaaacgctaacgtaaagcttgtgtatacaattacccaactgagcgaaaaagaagtttccacgatgacactgaaaataaacgatgttgcgttctactcttttaaaccagataaagcagacaaaggaacaaaacagattgaaatccaaattccgaaagataagttaaaaaaaggagtcaatgttctatccatcgaaagctttgtctacactgatttgcctgatggtcgttgtacgattgacgatacacctgccaactggctgcaattcgataaaacaagcgcagtaaacgtatcttattccgataaggctttccaaaaaacgattgccgagtttggcgagcgcttcactggaattgatactgtgaaaagtgaacaaggcgcagtagctgtctcaaacaaagccggcgatgccgaac

SEQ ID NO: 2021 - DNA, 2459 bp, Listeria monocytogenes-4B
  misc-feature (1)..(end): n can be any nucleotide a,g,c or t/u
gcaaccctcgaccagaccatcaggaatgaaaaaggagaaataacaatgacaaacaaagaaaaattcactggttttgatttttccaccaatccatacgaagaagaagcaaaaaaacgttggggcgataaagtagtagaaaaagccaatgaaaaagtaaataatatgaacgaaaaagaaaaattaactttaaaagaaagtttcgacgcagaatttcgtcatttagcatctgttcgagaactctctcccgagtcagaagaagcccaactcgcaattgaccattttttccattacttgaatgacacccacggcaatatttattccctagaagcctttgctgatcttggggaaatgtacgttgctgatgagcgcttcactaaaaatatcgatcagttcggtgatggcctttctcacttcctcaaagaagccatgaacatttatgccaaaaacaaataaaaaaagccacgatttcttaaaaagagatcgtggttttatgattggtataacaaagaacggggtaaatagtataagatttcattaatatgtatttatgatgtaaaataaagaataaaaatacatttcaagggaggaacttatgtttaaacacatcttgctttcactaaatgggtacaaaatatcctatttacgaaatgatgtcatttcaggcgttggtgttgctgcactgacgattccagttgcaatgggatatgcacaagtagcaggacttccacccatttatggattatatgcatcatttttaccggttattgcgtatgttatttttgccagttcaccacaacttgttttcggaattgatgcaacggcaagtgccatcacaggatccatcattttaggaacagctggacttgctgccggatctaaagaagctatcgcgctcgccccaattctcgcattcttttgtgcaatatttttagttcttttctccgtattaaaattaggacgtttcgcaaaatacatatcagccccggttcttagtggattcatttccggacttagtgtctccatcattatggggcaaattcctaagataatgggcctaaaagaaagcggagatagtttcttctctagtctaggcattattttcggacagtttttccagtccaattggatttcatttgccatgggcgtggttacagtcattattgttatcacttgtaaaaaagttataccaaaaatccctatgtctcttgtagttttagtacttgggacaatggctgcttatttctttaaattagatcaatataatgttgatattgtaggtaaaattccagttggcttcccttcactagcgctacccgattttggtgcaagttcgtgggcactcgcgattggcggcggtttagtatgtgccatcgcaacttttgccggttcgcttttaccaagtgaaagttttgctatgaggaacaaatatacgattgatgataatcgtgagttatttgcttatgggatttctaatttcgtcgctgcgttttctggttgttccccagcaagtgccagcgtatccagaactgctgctaacgaacaatttcgtggtaaaacgcaaatggtttctatcgttgctgcgaccattattgcgctaatcgttgccttcttaagtggcttactttactatatgccgcaaccagttctttcaggtatcgtatttgctgcccttgtaggtattattgatgtagatgtgttaaaaggtttattcaaagtttctcgtcgtgaagcaactgtttggattgttgcagcacttggtacccttttagttggcgttattttcggggtactacttgggatttccctatcattcattaacgtagtaagtcgttcgatgaaatcaccaatgnccattcttggagtgatcgaaggacgccacggttatttcgatttaaaacgtaaaccagaagcaaaaccaattccaaatgttgtcatttatcgttatagcgcttctcttttcttcgggaatttcaacaaattcgcagacggattaaaagaagcagttcaagatgatacaaaactagtcatttttgaagcgagtgcgattattaacattgatacaaccgcaaccgaatctatgaaagacttgctcaaatggcttgatgacaaaggcattgaatattacttcgctgacctaattgatcatttgaaaaccagctttagaaaacatgatcttggctatattatcgataacggctacacgaagaaaaccgtggaagacgcgctaaaggcttattatgccgaacataaataacaaaacgcttagccgggcctaaactcgactaagcgtttttcatttttacaaaagcgcaaaaatccgcggactaattaaccgcacaaacggtgacacgataaaaatttgcaaaaataaagccacaaaataattgcgcaaaataagaatacctagactttccagcacagtggcggccgctagagcagcgatctaggtgcccaagaag

SEQ ID NO: 2022 - DNA, 1627 bp, Listeria monocytogenes-4B
ttatcgcttagctgattttgtgttagaaggaggttccattcatgtcgatggtgaaggcacgcttgtaacgacagaagaatgcttattatcagaaggtcgcaatccacaactttcaaaacagcaaatcgaaatggttttaaaagagtatttaaatttagaaaaaattatttggttaaaacgaggaatttatttagatgaaacgaatggtcatgtagataatattttcaattatgtacgcccaggtgtagtagcgctcgcgtggacagatgatgaaactgatccgcagtatgaaatttctaaagaatgctttgatattttatcgaatgaaaccgatgcaaaagggcgcaaattagaagtgcataaaataaatgtaccaaaaccaattttaattaccgatgaagaaagtaaaggtgtagatgctgtggaaggaacgctaccacgggaagaaggcgaccgactggcagcaagctatattaattactacacagcgaatggtggagtggttttcccgctatttggggatccaaatgatgaacttgcccgcgaaaaattacgtcaactttatccaaactgtgaagtggttggtgtgaaagcaagagaaattttacttggcggcggaaatattcactgtattactcaacaggtgccaagaggataaggagtgaacagcatgaatcaaaaaatagtcgtggcactaggtggaaatgcaatattatcgagtgatgccagtgctgaagcgcaacaaagtgcacttgaaaaaacagccgaatatttggtgcaatttatcgaaaacggggatgatttaattatttcgcatggaaatggaccgcaagtaggcaacctgatgctgcaacaacatgcgggagcttctgaaaagaatccagcaatgccgcttgatacgtgtgtcgcaatgacgcaagggagtattggctactggatgcaaaatgcgttagataaagcatttttaaaacacgggctagataaagtagcggtttcattaattacacaagttgttgtggataaagatgatcctgcttttaaaaaaccaaccaaaccaattgggccttttcttactaaagaagaggctgaaaaggaaatggcagaaactggtgcaatatttcttgaggacgctggtcgaggttaccgtaaagttgtaccatctcctcgcccgcttagtattaaagaacatcaaattattaaacaattggttgatagtggtgttgtgactatttctgctggtggaggcggagtttcagtcgttgaaaatggccttgatttatctggggtaaaaaaaaaaatcgataaagattttgcttctgaaaaacctgcagaactaattaggtgcggatttgttggttattttaacaggggtggaaaatgtttatatcaattataatcagccaaatcaaaagaaacttgaaagagttaccgtttcagaattagaaaaatatattgatgagaaacaatttgcagcaggaagtatgttgcccaaaatcgaagcagcaacagcttttgtcaaagaaagaccaaatgccaaagcaataatcacctcgcttgaaaatattggcgccatgctagctttccagcacatgtcggccgccgagcatgcgtgtaaagtgactacagc

SEQ ID NO: 2023 - DNA, 3398 bp, Listeria monocytogenes-4B
gtggaagacaacggaaaaaccgtaccgtgaatggttggaagcagaaatgacagaaattgccgatttagcaacagccgatttacattatgaagcaatggataaatcagaacgttttaaaaaacaacgcgcatttggttacactcaagatgagttaaataaaattttgattccgatggtaacacagaaaaaagatccattgggcgcaatgggttatgacgcaccacttgctgttttaagccaacgaccacaagtgttatttaattactttaaacaactttttgcgcaagtaaccaaccctccgattgatgggattcgcgaagaaacggtgacttctgcgatgacgttacttggtgatgaaggtaatattctaaatccaactgctcaaaatgctaaccggattcgcctgaaaacaccaattttatctcgaaaagaatttgcggcacttgagcaacaaacaaaatttgcccaaccgactgtcactttaccaattttatttaaggcagaggaaagagatggtttagaagctcgcttagaatcattatttgtagaagcagatgaaaaaatcgcagctggggcagaattgctcattttatcagatgatggggtaaatgcggattggattggcattccttctctcttagctgtcagtggattacatcatcatttagttaaagctgggacgcgtacacaagtgagtattgttgtgaaaacagcggaagcgagagatgtccatcaatgtgcgctcttaattggttacggggcagacgcggtatttccaagtcttgctatcgatacgtttgacggcttgattaaagaaggacggatgaaaggatttacacttgatgaggcggaaagtcgttatattgaagcaattacagatggaattctaaaaatcatgtccaaaatggggatatctacagtgcaaagttaccgtggtgcccagatttttgaagcaatcggtattggtgatgatgtaattaaacattatttcccgggaacagcctcgcaaattggcgggattccactggaagttatcgcgcaagaagcttggctccgtcatcgcgaagcctatcattatatcggctaccagagtttcacgcttaatacaggcggggaatatcagtggcgctcaaacggagaatatcatgtctacaatccactagcgattcattctttgcaacaagctactcgagaaaatgaccgtgaaacgtataatctttattcagatttaatgcaaaatcaaaataatgcctttttaagaggattactcacttttacaagtgatcgcaagccgattccactggacgaagtagagccggccgaagccatttttaaacgatttaagtctggcgcgatgtcttatggttcgattagtcaagaagctcatgaagcgcttgctatcgcaatgaaccgtatcggcgggaaaagtaatagtggggaaggcggcgaaaacccgaaccgatttaccccggacgaaaatggcgattggcgtagaagtgctatcaaacaaattgcatctggtcgttttggtgtaacaagccattacttggtcaatgcagaggaactgcaaatcaagatggctcaaggagcgaaacctggtgaaggtggacacttgcctggaaataaagtctatccatggatttcgaaaacgcgtggttcaacaactggtgtaggattgatttcaccaccgccacatcatgatatttactcgattgaagatttgtctcaattgattttcgatttaaaaaatgcaaatcaaaatgcacgtatcaatgtgaaactagtttcgaaaactggtattggtacgattgctgctggcgtagcgaaggggaatgccgacgttattttagtaagcggttatgaaggcggaactggtgcggcggcaagaacaagtatccgtcacgcgggagtgccgtgggaaatcggcttagctgaaacacaccaaacgctcttgctaaatggacttagaaacaaagtcgttgtcgaaacagatggcaaactaatgacaggaaaagacgttctggttgccgctatgctcggcgcggaagaatttggttttgcaacggcaccactcgtaacacttggttgcgtcatgatgcgggtttgtcacttggatacatgtccagtaggtgtagcgacacaaaatcctgagctgcggaaaaaattcagtggttcggcagattatgtcgtgaacttcttccattttatcgttgctgaaatgcgcgaaatgatggcggaacttggctttagaagtttaacagaaatcattggacataaagaatttttaactactcacgagaaaaaagaagcacattggaaagcaaaatatatcgacttttcgaatatgctttatagtgatgatttttataaaaaccaagtccaatattgcacaaaacaacaagaccacaaaatcgaccaaacgcttgatatgcgcgaacttgtgccattaattcagccggcactagaaaacggtgaaaaagtaactggaactttcgctgtacgaaatgttgaccgcgcgattggaacggttgctggctcctttattagcaaaaaatatggtgcagagggattgccggaagataccatttcacttgattttgttggttcagctggacaaagcttcggtgcttatacgcctcttggcatgacgctccgaattcacggtgacgccaatgattacttcggaaaaggactttctggtggcaaattgattgttagtccagatgctaaaacacctattaaaccgcatgattccgcgattgtcgggaatgtaacgctttacggtgcaactggtggttatgcctatgtgcacggaaaagcaggtgcacgtttcgctgttcggaatagtggtgcgacagctgttgtggaaggcatcggtgacaatggttgtgaatatatgacaggcggtgcagtagttgttctcggtgaaattggtgagaactttgcggctggaatgtctggtggagttgcttatctttagacaaacaataaacaagcgacgacagccaaaatcaatcatgaactcgtaaacagccgttctactttaaatacttccgaattaactaaattaaaacagctgattgaacaacacgcaaaccttacaggaagcaattttgctaaagatattctgcaaaattgggaagcagagaaagcgaattttattttcgtcattccaaatgaatatgaaatgatgctgacgagaatcacgacgcttgaacaaactggaaaaacacatgatgaagctgaattacaagctttttatgaacataaagacggaaaattagttgccggagtggcgaaatagagaggagtgaaaccatgggaaaagcaactggatttatggaatatgaccgaattccctctccaggacgtgatccgaaaagccggacacgtgactg

SEQ ID NO: 2024 - DNA, 2567 bp, Listeria monocytogenes-4B
ggtagcgggcacagtgtgctggaaaggcaagatttggccgaaatacttcgtcgtaaacgtgaaaaacgtggcgcgattgattttgactttaaagaagcacgtgtagttgttgatgaagacggtcatccagaagcagtcgttatgcgcgaacgttcagcgggagagcatttgattgaagaatttatgcttgctgccaatgaaacagttgcagagcatttccactggatggatgtaccatttatttaccgtatccatgaagatccaaaagaagataaattagcgcggttctttgaatttattacgaactttggtttgattgtgaaggggactgctaacgatattcacccagctgctttacaacaagtactagaagaagtaaaaggtaaaccagaagagatggttgtttcgactgttatgctgcgttcgatgcaacaagcgaagtatgacacagtaagcgccggacactttggtttgtctactgatttttatacacatttcacgtcaccaattcgtcggtacccggacttgattgttcacaggttgattagagagtatttaattaacggggatgttcgtccggaaacgttagaaaaacgcgctgaggagcttcctgagattgctgaacacagctcgaaaatggagcgccgtgccgttgaagcagagcgcgaaacagatgaactgaagaaaacggaatttatggtcgacaaagtgggcgaacgtttcatcggaatcattagttcggtaaccaattttggcttatttatcgaacttccaactacgattgaaggtttagttcatgtgagcgcaatgaaaggcgattacttcaaattccaccaaaatcaattagcgatgattggcgaaagaacaggccaaatttatcgtattggtgatgaagtggaagtcgaagtaaccaaagtagacgtggatgctcgtgaaatcgattttgcgcttcgtagtgaaggtaaaccaggtccagtgagcgataaacaaaaacgccaacgcgaaaaaccgattgataaaacaagaaatttcaagagtaaccagaaaaaaggtcgtaacaaacgtagagctggtaaatcagaagacgtgaaaccaaaatcagaacgtaaagaagacgaatggcatacaaaacctaaaaagaaaaagaagaaaaaacctttttatcaaggtgtagcaaaagaaagcccgaagaagaaaaaacgtcgctagaaaggatggggagttatgccaaaaggtgatggtaagctagttgcgcaaaataaaaaagcgcgccacgattacgcaattgaagaaacttttgaggctggcattgtcctgcaaggtactgaaattaaatccgtaagaaacgcacgggtaaacttaaaagattcctatgcacgtatcgacaaaggggaaattttcttacacaatatgcatattagtccttatgaacaagggaaccgctacaatcatgatccactaagaacgcgcaaattgcttttacataagaagcaaatcagccgtttaattggagaaacgaaagagtccggttattcgattgttccgctaaaaatgtatattaaagatggctacgcaaaagtactcatcggtgtagctcgaggtaaaaagaaatacgataaacgccaagacttaaaacaaaaagaagcaaaacgtgatatcgaacgcgcttttaaagagcgccaacaataaaagcctaaatctagtcattcaaccaaaagttggagaagctagatttaggctttttttatatgtcgattttggtgaattcgtttaaagagagattttgaagttcatcgtgaagaaaataatctatttcatttttgataccatttagaatacgctcttcttcaagcactttagccactctaagtgctcgttgcataaagtgtttacctttttgcttttggccgagcttatacagcacaattccttttttcgcaatagccatacagaattgtaagtagtaatggttatgcttagcgatttttatagataattcaatgtagtgcaaagctagttcatattcttcgtctaaaattaaataagtagcacgattaacatgaagtgaaatctcaatcgaaagggttggatataggtaacgatattttttaagttgagagataaggcgatttacaatatgttgagcggtttcattttcaaaaataaagaaaatatttcttaaaattaatatgtcattccaaaataattcatccgcttccgaaagtctgtcccaaatgtaggttactttttctcgagcaagttcaaaattatgttctttttcagctagtaaaataccttcaagtgaggctttaatatcagaaataaaaatatcagtgtggttttctaagtaatcatcgcatttggaaataacattaagtatcatatctgtttcggaggaggcaataatcttggagcgtacatcaaggatattcccttttgcacaaggtgcccgccccccctccccctgcccctccttccccccccgtctcgcgccgccccccttccccgtcccccttccgtcgtcgccgccgccccggccgccgcttccccactacaacaccaaaata

SEQ ID NO: 2025 - DNA, 2260 bp, Listeria monocytogenes-4B
gaaccttgttataacgcagtaaaagccgttgatagcggtaaaggttgtctatatatgtacggaaattatgctggcgatgtgatgaactttgatatgggcgctgaaatggctgcggacgacggtattcgcgttgaaacagtgcttgtaacagatgatatttactctgctgaaaatgtagaagatcgtcgtggtgtggctggtgacttaattgtatttaaagcagcggcatctgcagcagcaaaaggacttgacctagatgcggtgaaacaagctgctgaaaaagctaatgcaaatacgttctcgatgggtgttgcgctttcttcttctacccttcctgtaactggtaaagctattttcgaaatgaaagaaggcgaaatggaagttggtatgggaatccacggtgaaccaggaatcaaacgcacttccatcgaaccagctgataaagtggttgatcaaattatgggctatcttatagaagaaatgaaattaactgcggatgaagaagtgcatgtacttattaatggacttggcggtttaccagtgatggatcaatatatttgttatcgccgcgtcgatgaaattttgaaagaaaaaggcgtgcatattcataacccacttgttgggaactacgcgacttcgatggatatgattggtatgtcgattacactggttcgtttagacgatgaactgaaagatcttttagatacaccgtgcgacacaccatatttcaaagtggactaaattactactggaggaataaaaatgagcgaattagttatggatagcgcttttttcggccacgttttacaggacatgggagcgctaattgaaaaagaacgtgattacttaaccggactggactcggatattggagacggcgaccacggaatcaatcttagtattggctttcgtgaagtgaataaacaattagacgaattactcgctgcttctcccgatattgcaacgttgcttaaaaaatccggaatgattctccttggaaaagttggtggcgcatctggcccgctttatggcagtttctttatgaaatgtggcgctgatgttcctgggaaaacggaggttaacttcgacgagctttgcggcatgattataaatggggccgctgcggttcaacatcgcggaaaagccgaacttggtgataaaacgatgatggacgccttcttgcctggcgtggaagtgcttcaaaatcgagatacaaatgcagctccaatcgaaactttttccgcatttgtagatgctatgcatgctggcgctcagtccactatcccacttattgctaagaaaggtcgcgcactaagacttggcgaacgagcaattggtcaccttgatcctggctctgaatcgtcttggatgttaatgaatgtcattttagaaaatttaaaaaaggcggtctgatttatgcgtaaacccttagttggaattaatatgaaaaactatattaacactcgggctcagacatctgaatggttagaagcgactatccctcttcttaaaaatttttctgatgtggatacgtttatctttccttctatgggcacactcgaaacgaccgccaaccttttagcggggacattatttggctttggtccacaaaatatggcgccggagaaatccggcccgctaactggtgaattttcggtggaatctatcattgacttaaacgcgaactatgtcgaaattggtcacgcagaacgcaaaaacctttttcatgagaaaactagtgagatagcgaagaagattaaacttgcattggacgaaaaaatcactccggttgtctgtgtgggtgaagaagtccgtgcgaatgatacaaatgaattaaaaaatgcgctaaaaaaacaaatcgaagcgctgtttcagacaattaatttagcacagtgggaaaatgttgttctggcttatgaaccggagtgggcaattggaaaggcgtcttcagctgagacaaactacatcgaaagcgcgcatcaagcgctgcgtgaaattattcgcgaactaggcggcgatgaaacgctcgtaagaattatttacggtggctcggtcagcaaagaaaacgccgcagaaattgtccgtcaaaaaaatgtcgatggtttattcgtcggaagatttggccataaaccgcaaaattttgccgacattgtttctattgttatgcaaacgaaaggatgagttagtatgaaaatcgcaattggttgtgacgaaatgggttacgaactaaaacaaaccctcatcacacgtttaaaggaga

SEQ ID NO: 2026 - DNA, 2219 bp, Listeria monocytogenes-4B
gcggcttcttgcattcgcttctcttcagcggctttaattgcagcctcttgttttgctttttcacctgcaatattagaagcaagtcgtttttcttcatcagtaagcgcaccttgttcactagctaaaagggtttgttcgctcttagttaagtcttttttgtttgctagagccataactaaatcatttttttcttgtttttgactttccatattgtttttcgaaacttctaattccactgcaagtacttttagattctctagttttttctgagaagcagattctgctacttttagtttatcttgatcatctttttggtcttgcataatgttttggtccgcttttacaattgccgatacaactgtcacgcggtcaacaagttctttaaaatcatctgcttcaaaaatcatatctaaataagaagtggctgttccagttgtttggatagcacgcgctcgattatcaagtactttttgacgatcgcgaatatcattgcgcagtttttccatttctttttgcaatttctttagtttctcgttttcagagctcactttatcttcctgctcttttaatttcttgttagtggcatcaagacttttcataagtgattctaattcttttgcagcgtctttttcagcactttctaaatgatttaattccgagtttttcgagtctatatttttatctagttctgattttttttgttcaatttcattttggcgcttttgcatatcattgatagtatccgcgtgcgcaccagttagtggcgcggaaataaccaataggctaagaatcgttactaccccatatttttttaacattttaagctccttttctattctctatttgactaggaactcgcccccccctttaccataccatataaaaaagcaaatataattaaaacgacaaaggtgctttttaacttttcaataataattagaagttagctacgcggccatatcctacaagatatttagcccagtaaccgctagtgatgttgtcatatttaacgccattgttttgagcgttaatcatttgaccgccaccaacataaattccaacgtgagcaattccgctaccatagttaaagaatactaagtcacctggttttgcttggctagcgctgattttagatgctgctgcatattgtccaccagatgttcttggaagagaaacaccagctgcacggaaagcataagaagtaaatcctgaacagtcaaatgcgcttggtccagttgctccaaggctataaggttttccaagttgtgcgttagctgcagcaatcattgctgagtatccgccactagatggtgttgctgcgcttggtgctgaattgttatcatttgatgcaacatttttcgttgtattagattttccacttgatgtagaagtagctgaactacttgattcttgtccaacgtttgaagatgttgcttcacgtaaagctgtcgcacgtgctgtagcttctttagctgctttatcacgttcacttacaagaccagcttttgcattttcagcacttgcttgatcagaagctagttgagcaacgattgcttctttttcagctttttgtgcttcgattttattttgttgtgcttcatattcatgaattgctgttgcttgatcttcttgttttttcttaacagcagtttgttttgtttttaaagctttttcatcattttgttgatcttctaaaatagatttatcagaatcaactaattggttaactgcagaaacacgaccaactaagtcagaaagattttctgcatctaagataacttcaagataagcattagaattagaagttttttgcatcgcacgagcacgttcttttaaaacagtttcgcgttctttaatacgttcattgatacttttaatatcttcattaagtttttttagttctttgcctgttttatcaaattctccttgtagagatttagctttttcttgagctttctcaaggtctgctactaaaccagaaagatctgattgtaaatctgtttttttagacttgatgtcgttaatttttttatcttggttttgaatgtctgtattcacgtccgcgaaaacattagtcgtaaaagctggcgtcaaactgataactgctgcgagtgaaatcgcaataaacgtattctttttcaaaaagtttacctcctaaaaagctccctagctttttcttttaaattatttttatttcgatttaagtaattttctgagtt

SEQ ID NO: 2027 - DNA, 2856 bp, Listeria monocytogenes-4B
aagttctccaaaaaatgaatttcgaagtcggcacaagaggtaaccatgagtttgatgaaggattaccagaatacaaacgaatttggacggagtttctacaaacaaattcggaccaatcgtagaagcttatccacgcgttaaaagtgacatgaaaatcgtcgcagctaacgtggtcaacaaaggaacaaacacagtcgcagaaggctttttaccatactatgtaaaagaaattgatggcgtcaaagttggcttcatcggtatcgttacaacagaaattcctaatttagttcttgcaaatcatattaaagactatgatttccttgatgaagcagaaacaatcgttaaatactctgctgaactaagaggccaaggcgttaacgcaatcgttgttttatctcacgttccggcactttctactggaaatcctaacactggaacaaaacaagatgtagctggggaagctgctaatatgatcacaaaagcaaatgaattagacccaaataactcggtcgatttagttcttgctggacacaatcaccaatacacaaatggattagtcggaaaaactcgtatcgttcaaagttacaacaatggtaaagctttttcagatgtaactggcgaacttgataaaactaccggcgatttcgttacaccacctgacgctaaaattacatacaacacgagaagcgtcacaccaaatgccgatattacagctgttactgaagatgcgaaaagccgcattgaaggggttatcaacgaaactatcggactagccaataaagacgttatttctcgtgacaccaatccagacaacaaagcaattgatgataaagaatcagagcttggtaacatgattacagatgcgcaacgttacatggcaaataaagccggcgccgatgtcgactttgctatgactaacaacggcggaattcgttctgaccttactactcgtcttgcaaatggccaaaacgaaatcacatggggcgcggcacaagctgttcaaccatttggtaacattcttcaagtagtagaaatgactggtgctgatattttggaagctctaaaccaacaatatttaagcaaccaaacttatttcctacaaatttctggattaaaatatactttcactgatacagatgacttagatcatgcgtacaaagttacaagcgttacaacagaagacggaactcctttaaaagccgaccaaaaatacaaagtcgtaatcaatgacttcctatttggcggtggcgatggattctctgccttcaaaaaagcaaacctagtaactgcaatcgacccagacactgaaacattcatcaactacatcaaagaccaaaaagctgctggaaaagtcattacagctcaaaaagaaggacgtaaagtctacaaatcccaagctgaaatcgacaaagaaaccgaagatgcagctatcaaagcaatcaaagacgcaacaaaaatcaataaactagccgaaaaagacaaaactctaactggaacaactttgcctggcgcaactgtctctgttcaaaaagcaactgctaacgcaagaatggcccttgctgccggacctaacgcaacagctgacgcaaatggcaagttttccgtagatgtaacatctttaaaccttaaaaaaggcgaccaaatcacaacaactatcactgacccgaacggatacagcaccactttccaagcaacggttcaagctgcggcaacaactcctccagataatggaaacggcggcacggacaatggtaatggaaacggaaataacggtggcacagatggaaatggcggaacaaataacggtaacggctccggcacaaacggcggaactactactaccgaagatccgacaactacgacaccaaacacatcaacaacaggaacttctgctaacacatccttaccaacaactggtgatacagctggatttgcaactgtattcggtattgttttaacgactactgcgctttatgttttgcggaagagaagttaattgagaaaaaggagcagccaaattggccgctccttttttatctttttcctgtattaacttctgtttttaaaacccaacttcctggaacaccctttgtagtagttaaattaagcgttttttctgtttctttataaacaaaaacctttgttcctgcttctaaatatcctttaatatttgtgcctgatatagcatcatcacttgtcaaatatttacctgccctatattttgttaccatagccccaaaaatctcttgtactgctgctacaattcctaaacaataatcagtttgataagctttcttctcaagaattaatgcatcagtgctatcacaaaaaccagcttccagtaagatagcgtccattgctgtttctcttaatacagcaaaattagccttcttcatcccacgatcattcattccgtgtttagtaactttagcaataatatttttatgaatgattttctgtatttctaccgttgcagccgggacggatgtgtaaatataatcttcatatcctttaccgccaccagcattaaaatgaagcgaaataaataaatcagctttaaaactattcgccttcttcgcacgatcacttaattcatagaatgtatcatttgtccttgtcattcccacttcaaaaccagctttaactaactccgtttgaagttgttttgctacagttagtacccaatttttttcaacaagtccattaccactcgcacctgaatccttaccaccgtgtccagcgtcaatccatatctttgtcatgtttttcctcatcctctcctgactttgcatcgaaaatcaaaattaaatatttcaatacttccgggacctttccagcacactggtgcccctaggc

SEQ ID NO: 2028 - DNA, 2370 bp, Listeria monocytogenes-4B
gcctaaagtaacttctgctgctgatggccgacatgtgctggaaagcgtaccatacaatgatgactgaactacatgaggttgctggtggtcgtgttgaaccaactgcaattcaatatgatttacgtcgtttgtttaatagaacaaaagttaatcttgtaactgataacgtgacacatgtagatcatgataaaaaagttgtaacaacagagcacggtagttattcgtttgattacctagtacttggtatgggcggagaacctaatgatttcggaactcctggtgttggcgaaaatggctttacactttggtcttgggaagattctgttaagttacgcaatcatattgaagaaactgtaacgaaagcatctcgcgaacaagacgttgaaaaacgtaaagcaatgttaacattcgttgtttgtggatctggatttactggtatcgaaatggttggggaacttttagaatggaaagatcgtcttgctaaagataacaaaattgacgcatctgaaattaaactagttgtagtagaagctgctccaacaatcctaaacatgcttgaaagaagagacgctgacaaagctgaacgttacatggttaaaaaaggtattgaaatcatgaaaaacgctgctatcgttgaagttaaacctgaaagcatcgtacttaaatctggcgaagagcttccaacaagtacattaatttggactgctggtgttcgcgctaactctgatacaaaagattacggtatggaatctgctcgtgcaggccgtttgaaagtaaaccaatatatggaagcagaaggtcttaaagacgtttatgtcgttggtgaccttgcttactttgaagatgaagaaggtaaaccaactccgcaaatcgttgaaggtgctgaacaaactgcattaactgcagcgaaaagcattatcgtggaaatgagcggtactggcgagaaagaaccattccaaggtaaatatcatggtgtaatggtttctatcggagctaaatacggtgttgctcaccttggtggtatgcacttatctggttggttcgctattttaatgaaacatatggttaacttgtattacttcttcggtattcgcagtggttattacatgtggcaatatattatgcatgaattcttccacattaaagatcaccgcaacattttccgtggttggacttctcgttatggtaacgtactttgggttcttcctttacgtgtatatcttggttggttctggattgacgaagctctttctaaaatctacggtgaaactacatgggataaagtaagtattacaaatttaaaacctttatttaacggtatcggttctgattcttggttaactgcaactacctctaaaatgccattcgaatggttacaaactgctgctacatctggtgctagtcaagctgccggtgatgctgctggggctgctgcaacaaatgtaactactccaattcttagtcatatgcctggttggttccagtggattatggaacttctaatgccaaaccttgatgttgctctagtaatgcaaaaagttgtaccttttgttgaacttgcaatcggtcttgctatggtggtaggtctattcacttggcttgtaagtatcggaagtgccggattcctagtaatgtttacactaagcgctatgcttggttgggacaaattctgggcgttaccagcttctatcgcacttctaaatggcgctggacgcacatttggtcttgattattgggctgttccttggttccaaaaacatcttggtcattggtggtacggtaagccaagatccgtttacagagacaagtaatttagttagttaaaattttaaataaaaactcgggagtgcatccaaaagccagttttggcataggaggtgcttccgtttttattatttgttgatttcttgaactttttcctattatatttaggcattatcctttaaaataggatttgtacatttcattttgaaaggaggcaatacggtgaagaagtatctttctatggtgaagcgttgggatattattattattttatctctttgtatactctcctttttgccgattgctattttttcatatgtaaaagcgaatgaaccggctcctgctaacggaaaaaaagagcttgttgcagttatttctgttgatagtaaagaatataaaactgttacgctcactgggcacaaagggacggaaagctttgatgtgaaacaaccagatggaccttactaacacgattgaggtttcgggggaagaaatccgaattagtaaagcgaactgtaacgatcaagtatgtgttcggactggagcaattgtaaacaagcgatcagtgttgcttccatagtagtatagacacggtgtacttccacc

SEQ ID NO: 2029 - DNA, 4544 bp, Listeria monocytogenes-4B
atgaatatagaaaagtttagatgttttgtgtaagggaaaatataaaaaaactcaagtaagggggcttttctgtgttacaaagaagattttggggtattttttgttttgccatattcttgtttttatttccaactattggttctgccgaaacatctggtgactatgaatatacaataaatggaaatgaagctaccattactgattatacaggacagtctactgatattaccattcctacaacacttggtactaataatgaatataccgttactgctatcgggaatggcgcattcaaatccaagagattaactaatgtaacgattcctaatacagttataactattggcgatggtgcttttaccatcaattcacttgaacaactagtcttacccaactcagtgcagactatagggaggaactcttttagtgtcaataaattagaaaaaataacttattctactgctttaaaaaatattccttcccaagcatttttagctaataatttaaaaacagtgactacaccagccactgttgaaagtattgatgcttctgcctttgaaaataattttattactaatattacaattcaaaacccaaatcttcaaatggcttatcaagcttttgccgctcaaacagttttaagtacactcattgtaccaagcaaccacatcctacctatagaaaattacattcagtttcaagatgcttcggctcatttgactacagataatttattcataactgatttagcgaatggtattacgtataatcaagccgaaaaagcattaaacttttcagcagagccactcgaatctactttttcacttttgcactgggacaaatcgatttgattcttactatgatatttctgaatatggtccttctggaaagccatttatctacttcaagtatactaaaccagtcctagtttcctataaagatgcgtctgggaatgaattagctacttctactagattagatggtagtattggtgaaaattacgtcactactcctaaaataatagatggctatactttaaaagaaacacccggaaatgcgacaggacaattttctgaaacactgcaaaatgtaacgtatatttatgaaaaaactgctgtccaaaatgggacagtcactgtaaaatatcaagatgaatcgggtaaaacactagcaaaagatactgttttaaccggtgaagtaaataatacctaccaaactaaaagcaaagacatagcaggctataaacttcaaaaagtggaaggaaatgaatcgggtacttttagcacaacccctgcaactgttacctatatttatgaaaaaatagcaaacagtgataatacaaataccaatggagaaatgaccgacaatactacactgagtactaatgatactgtgatttcatccgaagcaacaaaaaaagttgataaaaacacctctaatatcctcccaactactggtgattcaaaagatgctctcttttttgcactaggaagtttattgacgttgttatctactagcttctttttctttaaaagaagttaaaccactccataaaaaagtgctacaaaccgctagttggtttgtagcactttttttgttacgcttttaattctttaatacaagcaattttatcatctgctctaaagaagtaagagcctgctacaagaacgtctacgcccgcttgcttacatttttctgcggtttcggcatttacaccaccgtcgacttcgatcacatagctgccgttattttctcggcgccaatgatccagatagcgcatgtttttgatggtagaatcaatgaaagcttgtccaccaaaccctggatttacggtcatttgtaaaactaaatctacatctgctaaaacggcatccagcacgctcgccggtgttcctggattaagcacgactcccgctttacagcccgctgccttaatttgttgaatgacgcggtggatgtgcggcgccgcttcgatatgcacggaaataatgtgcgccccagctgctgcaaatttttcaatatagttttctgggttcgagagcattaagtggacatccagtggaatagtcgctgttttcttgatttgctcgaccatatcaattccaaacgtcagattcggcacaaaatgtccgtccatgacatcgatatgaaggtagtcagctccggcatgttctgcttctttaatggagtttgccatgttcatataatcagctgcgagtaatgatggcgctacgaatgtcatacgcgcacaccggctttcgcaatcacagcttcgacacgatccgccacattttctggtgtaaatccataagcgttaaacaaatctttcgcaggggcagatgcgccgaagtgatcgattcctaacatatcgccttctgacccaataaattctttccaaccgaatgttgctcctgcttcaatcgcaaatctcgctgtgacttcttttggtaaaatgctttctttataagcatcggttgttttttcaaagcgttcccagctggataaactaacaacggaaacgtcgatatcttttttcgcaagttcggctttcgcttcaattgcaagggacacttctgatcctgttgcgataatgatagcgtctggtttggaactatttgctggtgctacgatataagcacctttatctacacctgcatccacttcttcttgtgcattttcaagcactggtaagtcttggcgtgataatacaagtgcgattggaccatttgtgttagttgcggcaatttcccaagcagcgcgggtttctttggcatcggctgggcgaataactgttaggcctggcatagcacgaagcgaggctagttgttcgattggttcatgtgtcgggccgtcttcacctacagcgatactgtcatgcgtgaatacatacgttactggaagttgcattaaagcagccatccgcattgctgggcggacatagtctgagaagacgaagaaagtcgagccaaacactcgcaaaccgctatgaagtgccattccgtttaacattgctcccatcgcaaattcgcgcacaccgaaccagatatttttaccagctgggtcttgaatgctatatgctgggctcgcatcaataaatgttttgttcgagcaacctaagtcagcggatcccccgaaaagttccggtaattcggctgcaattgcgttaatcattttcccagaagcagagcgcgttgcaacatttgtgcctgcttcaaaagttggcaaattagcgttccaatcggcagctacttctcccgctaacacgcggtctaattgacttgcaagttctgggaattcttttttgtaattagcgagcattgtgttccaagcaccctctagtttttccccgcgagctttgtaatttcttaagtaatcacgaacttcggctggtactgtgaaaggttcttctgcccattcgtaatgctcttttgcaccatttgcttctttttcaccgagcggagcaccgtgacttgcggagctgcctgcttttgttggtgcgccgtaaccgatgactgttttcacttcgattagcgttggtttcgatgtttctaattttgcttgaacaattttttcttgaattgccgctaaattgttgccatcttctacacgtaaaacttgccagccgtatgcgcggaaacggtctgctgcattttcactgaacgttgcgcttaaatctccatctaaacaaatatcattggaatcgtacaatacgattaatttcccaagtcctaaatgtcctgcaagtgaggctgtttctgatgccacgccttccatcaagtctccgtcaccacaaatcgcatacgtataatggtcgacaattggataatttggttggttatactccgccgctaaatgagactctgcaagcgccattccagccgccataccaatcccttgtccaagcgggccactcgttgcatcgactccagcagtccatccaaattcagggtgtcctggtgtcaaactatctaattgacggaactgttttaagtcttccatttttacatcataaccaaataaatgaagcatgctataaagtagcgcagacccgtgtcctgctgataaaacaaagcgatcgcggttaaaccattctgggttggctgggttgaatactaaatgtttcgcaaatagcatatacgccattggagctgctcccatcggcattcctgggtgtcctgaatttgctttctcaatcatatcaatggataacgaacgaatcgtgtccacggcttgtctatctaatgtttttttcaaaactgtcatctcccttaaattgtttgtgctttattacacatgtttttctacatctgaccaaatgtgtactagtctttctgcataactcgttttatctcggtcatgaaataacgcggatgtgcctagtacataaatgtctggtaagcaatctcgcattaagcctactgtttctttattaatattgccatccacttcaatgagcggcgcatggacttttccagctagttttgcttttaaatcatgtagcttttgtaatacatctgtttgaaatttttgtcccgcaaaacccg

SEQ ID NO: 2030 - DNA, 3304 bp, Listeria monocytogenes-4B
aagaggatattgcgatttcagtagatgaaagcgggaaagtgttagatactgcgagtgaagcgcttagtacgattcgccgaacactccgccgtaccgaagaccgcgtacgtgaaaaactagaatcttatttgcgcgatcgtaatgcctctaaaatgttaagcgatgcggttattacgattcgaaatgatcgttatgttatcccagttaaacaagaatacaaaggtcattatggtggtatcgttcatgaccagtctgcttccggtcaaacgcttttcatcgagccacaaagtgtagtggatttaaacaacgaacgaaaagcacttcaagcaaaggaaaaacaagaaatagaacgcattcttgctgaaatttctgcttcactagctgcttggattaatgaaattcatcataatactttcatcctcgggcgctttgattttattttcgccaaagcacgtttcggaaaagcgatgaaagctgtaacaccgcatttgagtgatgctggtgtcgtccatttaatcgccgcacgccacccgcttttagacgctgcgaaagttgtagcgaatgatatttatttaggcgaagatttcactaccatcgttatcaccggtccaaatacaggtggtaaaacaattaccctgaaaacattgggattactaacactcatggcacaatctggacttcaaattcccgcgcaagaagattctactatcgctgtttttgagcatgtatttgccgatattggtgacgaacaatccatcgaacaaagtttaagtacgttctcatctcacatgacgaatattgtttccattttgggaaatgttaatcagaaatcgcttattttgtacgatgaactcggagcgggaacagacccacaagaaggtgcggctttagcaatcgccattcttgatgcaagccatgcaaaaggtgcaagtgttgttgcgacgacccattatccggaactaaaagcatatggatataatcgcgttcacgcaaccaatgcatctgttgagttcaatgtcgaaacacttagcccaacttataaattattaatcggtgtacccggtcgaagtaatgcttttgatatttcacgccgcttaggattaagcgaaaatattatcactgaagcaagaagccttgtcgataccgaaagtgccgatttaaatgatatgatttccagcctagaagagaaacggaacttagcggaaaccgagtatgaggaagcacgtgaattagctcgcggggctgataaccttttaaaagatttacaaaaagaaatcagcaactactatcaacaaaaagataaattaatcgaacaagcgagtgaaaaagcagcaactattgtggaaaaagccgaagccgaggccgaagaaatcatccacgaattgcgcaccatgcaattaaacggagcagcaggaatcaaagaacatgaacttatcgatgccaaaacaagacttgggaatgctaaaccaaaaacaataaacaaaaccatcccacaagcgccaaaacaaaaaccacatgtattccaagaaggcgacaatgttcgtgtcctctcccttggccaaaaaggcacacttttaaataaaattagcgataaagaatggaacgtccaaatcggcatcatcaaaatgaaaatcaaaactactgacttagaatacattcaaccagaaaaaccaaaaaaaacaacgtatcattacatccgttcatagtagtggttctccagctaaaagcgaactcgatttacgcggcgaacgatatgaagacgcgctacaaaaagtcgacaaatatctagatgaagcactactcgcaggatatcctcaagttgccattatacacggtaaaggaactggtgcccttagaaccggggtcacagaatatctgaaaaaccaccgcatggtcaaatcaatccgtttcggcgcagcagcagaaggcggaaatggtgtaacgattgttgagttcaagtaaacaactgagcaaaaacatggctccaaataggtctaggtgctatactgtgtgtacgaaagtcataaggagtgaattaaatcatggtaaaagaaattacagatgcaacattgaacaagaaactagcgaaggcttagtattaacagatttctgggcaacatggtgtggtccttgccgcatggtggctccagttttagaagaaatacaagaagaacgcggcgaagcacttaaaatcgtcaaaatggacgtagatgaaaacccagaaacaccaggaagttttggtgtgatgagtattccaacacttcttatcaaaaaagacggcgaagtagtagaaacaattatcggctaccgtccaaaagaagaactggatgaagtcatcaacaaatacgtttaaaattatgctaaaatgaaagaagcttagaacaaacattctaagcttctttttaaatgtgtaactggagttgataaaatgtcttctgaacatatccaaaataaactagcgcttctgccggaccaacctggttgttatttgatgaaagatagacaaggaaccattatttatgttgggaaagcaaaaattttaaaaaatcgtgttcgatcctatttttcaggaacacacgatagtaaaacgcaacgcttagttcaagaaattgtggactttgaatatatcgtaacatcatccaacgtagaagccttgctactagaaatcaatttgatcaaaaaacatgatcctcgttttaatattcgcctaaaagatgataaaacttatccgtttattaaaatcacgaacgaacgacatccacgcctaattattacccgtcaagtaaaaaaagacaaagggaaatattttggtccatatccaaatgtgtatgctgctaatgaagtaaaacgtattttagatcgactgtatccattacgtaaatgcagtacgctaccaaataaagtgtgtttgtactatcacctcggacaatgccttgccccgtgtgtatttgacgtggaagcaagtaagtataaagaaatgcaagacgagatagtcgcattcctaaatggcggctataaaactgtcaaaaatgatttaatgaagaaaatgcaagaagcagctgaaaatatggaattcgaaaaagcgggtgaattccgcgaccaaatcaacgcaatcgaaacaacaatggaaaaacaaaaaatgacgatgaacgatttcgttgaccgtgatgtctttggttatgccattgataaaggctggatgtgcgtccaagtattcttcattcgtcaagggaaactgattgagcgcgatgtctcccagcttccattctataatgatgcagatgaagatatcctcacacttatt

SEQ ID NO: 2031 - DNA, 2742 bp, Listeria monocytogenes-4B
  misc-feature (1)..(end): n can be any nucleotide a,g,c or t/u
catgactgtagcgatgactcaaattgttcaagatattttaagtattgttacgtatcattatggtatggtattggatgaaacttcactgaattacacgcgttttattacacatttacagtatttcgcgcaacgtttgcttcgaaaagagattgtcgattccggcgatgactttttatatgaacaagtgcaaattaaatatccagaagcttttaaatgtacgaaaaaaattgatgcctatttaataaatacgcatcatacagaactaacgagagacgagcgtgtctaccttactattcatatttatcgtgtcaccgaacgaaatacaattataaaagaagagtaaaatttttttggacttatatgtaatggattacagaaaagtactgcttagcgcggtgcttttttattgtagttttttttctactaaaatgacagaaagtaatacggcaaaaatacttgttgttaataaaatcgagctacgaataaaggcatgcatcgggataaaagcaagtacaagtgacaaaactagaagagaaaccccgataactatccagtagattcctagagattgatgcgctttttgccaagagatttcattttttaaagatgctttcgttcgataactaaagcgactttctttatttttaggtggattcacccggtagatgacaccgagaataataagtaaaagtggaaagattaaatcaaacataacgaacctccttataagtaccatcgtagtataacaaattattgtgaaaaattgaacggtttgtctctaaggtttaatgggtattggtgagagaagatgatcagttattttaaaggaggaaaaaagatgctttatagtgaagacgacaagcgaaaacaggaaagttatcgaatcccactctttggatctgaggaagaaagcacgagtatcccgaaatatgtattaaaaaaggaaccgatggaaccacgtattgcgtaccaactagtgaaagaccagttgatggatgagggaaatgcgcggcaaaacttagcaactttttgtcagacatacatggaaaaagaggcagaaatactgatggcagaaacgctcgagaaaaatgcaattgataaatccgaatatccgcaaacagctgaactggaaaatcgctgcgtcaatattttagccgatttgtggaatgctccaaaagatatgtcttacttggggacttcgacagtaggctcttcggaagcgtgtatgcttggcggtttggcaatgaaatttcgctggcgtaaccatgcggaaaaacgaggtctagatattcaagcgaaacgaccgaacttaattatttcatcaggctaccaagtatgttgggaaaaattctgtgtgtactgggatgtagatatgcgtgttgtgccaatggataaagagcatctcagtatcgatgtagataaagtgtttgatttggttgatgaatacacaattgggattgtcgggattttaggcattacttatactggtaaatttgatgatattcaattattagatgaaaaagtagaagcatataatgaagcgaacgagcatcaattagtcattcatgttgacggagcaagtggcgcgatgtttacaccatttgtaaatccggaattaccttgggatttccgccttaaaaatgttgtttctataaatacttccggtcataaatacggattggtttatcctggcgttggttggattttatggaaagacaaagaatatttaccaaaagagcttatatttgaagtcagctacttaggtggttcgatgccgacgatggcgattaacttctctcgtagtgccagtcaaattattggtcaatattataattttttacgatatggttttgaaggttaccgagaaattcatgaaaaaacaaagaaaacagccctttacttggcaaaaagtgtagaaaaaagtggctactttgaaattattaatgatggcgctaatttaccgattgtttgttacaaaatgaaagaaggactggatgtagagtggacgctatatgacttggctgatcagcttttaatgaaaggatggcaagttccagcctatccacttccggccgatttaagtgatacgattattcaacggtttgtttgtcgggcggacttaggctataacgtggctgaagagtttgcggttgattttgcagacgcgcttcataatctggaacatgctagagtgctgtatcatgacaaagaacgcaacgactcatacggatttacgcactaaaaaagaagacttggatggtgagtccgagtcttctttttattaaagtggaagccagtcgataatttctttgatactcttatcccaaaaatcccaatcatggtcaccggggccttcgcgatactctagcggagcatttttctcaagcgcaaaatctcggaaacgaagattatcttcatatagaaaatcttccgtgccacaattttggaaaagggctggtaatggcacttggttttggagattagtttctaataaatgaaataaatcattttccgtaccagtttggctagccatttcacccgtgatggcacgcgtgctgaaattttcgaagcagtcttctttaatgatataattaatatccatgacgccggacatactggccgcggcttggaatttttctgganaagtaagtgcaaccttgaacgcaccgtaacctcccatggaatgaccagctattaaagtatcttcttttnttatctgaagtgggaaccagttnttcataa

SEQ ID NO: 2032 - DNA, 3737 bp, Listeria monocytogenes-4B
  misc-feature (1)..(end): n can be any nucleotide a,g,c or t/u
attcaagaatctgcagaaaatcgtaatcaactagaacgggaactcattaaacaaaatccagttgtaaaagaaggtacgataaaagcacaaatgaatacagaagtagccgtaccgaaaacaccgncagtatcattctcttttaaagaattaagcagcttacaactaaacggaacaagctcagcaagtttagaattatatatgaaattaatgatgaacaatgctaaaaaagcgaatgatttaatcttttacgtgatgcgggcgggaatcaaaaatccaactgattctactaaatggcaaacagtcagaagcgagattagtagccaattaagtacaattctaatgaaacaacataattcctaatgcgtacttttctgaaaatcccgcgaatcaaaaattatttttagccaatcaaaaaattatgaacgaaatatcctttttgctaaaaatgttgccaaccttaacttttgaaacaacaggaaaatacgacttcttgcgcatgatgcaaatagcttctggcaatatggagactggaatccaaatgatgcgcgaattccaggggcatatcgaacatgcgacaagactagacccgattgttgacgccagacaagaaacgaactggatgattaaagtgttacgcgaatttggcaatatgttccaatcgcgccacttattaccatatgaattacaggcagaaaacatcaatatttggaagttgagtagcgaatacttaaaactaatgaaccaacttttaccgcaaattggcgcatttccaaatgggaatatcaaaatttttcaccaacaagcgaccaagccattaacggaacttttccaagaactgcaacgcttggcagacggacaaatgacgcaaggtgggatcgccgttattttagaccggatgcaaggccaacttacacgacttgcacaactgtttcaaaaaatggaaatcgaagcaggtttcaccgatacagaacgaattttaggtagtgtggacgccgaattcgctagtgatatgacaaaaatgatgctactcgcacaacaagaaatgtcattttttgatttattagtaaaagatttccgaagtgtttctaaacaaccaatatttttcatgatagttgctatatttattattttattattaattattttattttaaaaaagatattttttgaaaaaatatatactttttcaggttgtttcagtataattaaatagaaaaataaggtttagaaagcgaaaatgagtttttcgggggaaaaaggatgaataatgtttcaattggccaaatttcgcagtccaaacagacgaatgtagttaggggaatgcaagaattaaatcaaacacaacagctttattttgaacaaatgaaggcaaatggcaagaaacaaactccttccctgactgaaattaacgaactaatcacgaatgtcacagataaaaagtcactcgttgaaatggatatgacggtagataatgttttgagctataaaaaagcagtccaaacatttttgaatttttatgtgaataatgtgatggattacgacaatatcgaaagccgtcatccaaaatacgggttttcgcaaaaaatgacgattttaaagcaagtagaaaaacaaaccaatgaactcgatgatgtaatgaatttaattgatacaaaaactggacatttagacatgctaaaccgtattggtgagattactggcatgattctcgatgtcgtattgtaggtgatgggaatgcaaaacgaattaatcaatcaattagaaattttaatcgaaaaaaatgtcaaagcgaccgatgcagcaattttactcggaaaattagtgcaagaagagaactggattgaagcataagaatgccaactaggactacagcgcgaacttgccgctttgcaaaacgaatatcaagctttaaaaacaatcattggcgaagataatacgcttagaacgctccaaaatacttggacacctgcggaaaatgccattatagatgaacggaaaaaaatgctacttgaaaaagaaaaccttttacgagtaagtgttacggaaaaccaaattagaacagaaatgcaattggctttttcggaacatatggtggatgttattacgggacatcacgcggaaacacaagcagaaaataatatgatgataaacgagactttttaagtaaacggagggattttttgtgcgtttaagtgattttaatacgtcattatcgggcatgtcagcggcgcaaatcgctaatatggtcgctcagcaaaatattagtaatatgaatacgccaggatacataagacaagccgtggatcagacggcagtatacggtgacggtggtctgcttggtgggaaacaaacaggctacggagtcaaagtgacagacattaaacgtctaacaaatacagcacttacgacacaatacaataatcaaatcgccaaacaatccgcttcgttatatcaaagtggggcgctcggtcaggcacttaatttatttggtactccagggaaaaatacgccaagtgataatttagataatttcttcaccgcttgggcagcattagcgaaaaatcctgaccaagcaacgaatacaacggcacttttatccagtatgtcgatttttacggatcaattaaaccaacttcattcgggcttaaaagaattagaaacaaccattgcagcagatacagatgccgcgattcaagacttaaattcattaattaaaaaattaggcagtatcaataaagcaatcggaaatgcaggctccaacccaccgaacgatttgctgaaccaacgcgatcaactacttagtacgatggctggctatgctgggatttccgtgagcgcccatccgaataatccagatgtgtacgatgtgacaattggcggacgtcttgttgtccaaggtgatgaaacgaccgaaatcacatcaacgcgaaccgcgactggctttgaattttccgtagacggtcaaaaactcaacatgccagaaggttccatcatcgcttccgttcgtgttaaccaaaatgaaattaaatcgtaccaagaaaaaatcgaaactttttcgaacagcctagcaaaagcattagatgatattcaagtcaaaaacgtcaataaaacaatggacgatttgcaaaaaatcaatgatgcgctcaaagcgaatccgaacgacgaaaaactactgagcaatcgcgatgaacttttgcgtcaattagaaaaattccctggtgtgactcgttctggtgatacgctgacgattggcggagttgaccacgcgattgacacgcttggcacgagtacatatgtaaccgatgtgaatgatttttccattccaattttcacccaaagctctggcaaatggatcctgaatcctgcaatcacaagtaacgctgataacaagccgtttctaggagttatcgcggcggatatcgcttccttgaaaacagacaaaaacattcaaggaacaactttcccgagtttcatggacggaatcattaccgaagtggcgacggacgctagtaaaagtagcgcaaccttctacgggagacacgcaagctttaaattccctttctgaatcaaaatcatctcttgaaggagttaatattgacgaggaaatgacaaatatcatgcaataccaaagttattatgtggccaatacgaaagccatgaacacagtgaacgatatgatgaaagctctcttagccatgttataaggaggaaaaatatgcgaatttcaacgaatcaacc

SEQ ID NO: 2033 - DNA, 3873 bp, Listeria monocytogenes-4B
  misc-feature (1)..(end): n can be any nucleotide a,g,c or t/u
attcgtccatcgggcctcgaaagttacatagaatgccgccatgttcgtgacatgagcgtgggaacatcacagatatgcacaaaagcgtagaaaagctactacaaaaagacaaaacagtagtaaacgaaaatgccaacaaagacgcgactgtctttaatacgcaacgcgatttgacagcaggagccgtagcaaaaagttacgcattaaaataggtgctaccaaaacacgtatccaacgctcatttaaaaggggaaattcattttcacgatttagattacagcccataccatgcgatgaccaactgttgtttaatcgacatcgaaggaatgctgtcaaaaggatttacgattggtaatgccaacgtagaaagcccgaaatctatccaaactgctaccgcacaaattgctcaaataatcgcaaatgtagcaagttcgcagtacggcggctgttcggttgaccgtattgatgaagttttatccgtttacgcgcgtttgaactttgaaaaacataaaaaagatgcgatggaatgggtcgttccagaaaaacaagaaggctatgcagcggagaaaacacgcaaagatatttacgatgcgatgcaaagcttagaatacgaaatcaacacattatatacaagtaacggccaaacaccgttcgtaacactaggcttcggtcttggtgaagattggtttgcccgtgaaattcaaaaagccatcctaaaagtgcgtattggtggggttggtaaagataaacacacggctattttcccgaaattagtattttcaattcgccgtggaactaatttaaatgcagaagatcctaattatgacattaaacaattggcgctagagtgttcctcgaaacggatgtatccagatgtactcaactacgattcactcgttcgcttaacaggcgatttcaaagtaccaatgggctgtcgttcgttcttgccagcttgggaaaacgaaaacggcgaacacgtgaacgcgggaagaaacaatcttggtgttgtaacacttaacattccacgtatcgctatccaaagtggtggggacaaagaacgtttctgggaaattttccacgaacgcatgaaaacagtcaaagatgcgctacttttccgtttaaaccgcgtacgtcaagcacgtccagaaaatgcaccaattttatataaatacggagcatttggcaaacgactacaagatggcgaaaatgttgatcaacttttcaataaagaacgttctactatctctatcggataaatcggtctttatgaagcagcgactgtattttacggcggtgaatgggaaggcgacaaagaagcaaaaaacttcacgcttgatatcttgaaagaactaaaaggttatgcggacaactggaaagatgaatatggctactggtttagcgtatattcgactccaagtgaaagcttaactgaccgttttaaccgtttagacaaagaaaaatatggtgtaattaaagacatcacagataaagactactaccaaaactctttccactatgatgttcgtaaaaaaattaccccatttgaaaaaattgattttgaaaaagattatccagaattttgctctggcggattcattcattattgtgaatatccaaaaatggttcacaatacgaaagcacttgaggctgtatgggattactcctatgatcgtgtagcttaccttggtacaaatacaccaatcgataaatgttacgaatgtaattttgaaggtgaatttgttcctacagaagaaggcttcaaatgcccaagctgtggcaacaccgaccccgaaaaagcagatgttgtaaaacgtacttgtggctatttaggcaacccaatgaaacgtccaatggttcatggacgtcacgtagaaattagcaatcgcgtgaaacatatggagaacttaggtgaataatccaaaaccgtgtgaatggaagtcgaatgaattatccagagggtatatcgccgactataaggcattcaactttgtcgacggagagggcgtccggtgcagtctatatgtatctggatgtcctttccactgcgaaggctgttacaacaaggctgcgcaatcatttaaatacggcaaaccttacacgaaagaattagaagacgatatcctaaaagacatcggacatgaaagcgtccaaggcctcactttacttggcggagaaccatttctaaacaccgccacatgcctatctgtcgtgaaacgaatccgcgcgacatacggcgaaacaaaagatatctggtcatggaccggctacacctgggacgaaatgatgcaagaaaccgccgacaaactagaacttctatccttaatagatgttctggtagacggccgcttcgaacaaaaactattcgaccccaacctagcattccgcggttccagcaaccaaagaattattgatgtgcagaaatcacttgctactggtgaagtggttttgtatgagttgtgaaataggccctctttgatggagggcttattctttttgctttggatgcttattgaatatatgtgcgggcatagaatcaacaatgtaagaatgatgatagtactaatccaaataaaaaacgccacccataactcaggtggcgttttttaatcaacaaattgtctagctttcacataatcgtacaattccttatttctaacaacccattctcttccatttttccaaatcttaccttgttcttttaaaagggttaattgtttgtaaaaactgcttttcgatagattgctataagcagcgatagtactagttcgcatttctttcggtaaaataacactatctttttcataaagcgttccgtgtaatttgcccatattagaaaaagaaagctctaatttatcagaagaactagtctcggcgaaaaggcttttgaagaatgcatgtcgcgccaagtctcgcataatgaaaaattgaaaaccaaaattctctggaaacatcgaaagaaagtactctaaatctttaaaagaatatttgtaaatagtgcacggggaaatggttgtaaacagaaagtcatctacatttccttggaacaaactatagtaatttacaaaagagcctttacctaagactgtataaatactactagattgcggattcatagaaatagacacgaagccttctacaattaaatagacatggttatttctttgcgaggcagtatttactaaatctgtatgttttggaacttttaatttttcatatttaatattgccttcatgagaaagccgaacaaactctttataattaaataatgcatccattattagcagcccctttactttttntgttaactataatacataatatcgagaataacaaaaaattaatctatatacatataccgaagtgccacttttttgcggataatatgaccatttaatgagaaaaagctgcaaaaaatattatttggcatcttttagctattnagtaaagctcaggtcgtctatctgtgaaaaactggaatgatgcttcgcgtttcagcaccaagttttaagtcaatctcagcataaatatttcattcgtcgtcaccgccatgagcgacagtatttccaagtggatcaatcacaagtgagtgcccattgaaatgattattaggatcatcgccaactcgattgaagaaaaagacaaaagcttgattttcaatagcgcgtgcaataagtagttgctcccactgagtaacacgttcggctggccactgagctgaaacaaaaatgacttccgatccttctgaagtgtgtttgcgaatccattctggaaatctaatatcatagcaaatgaaaccagcgcaagaaacaccctttccagcacacgtcggccgctcgagcaggtgtagatgactgcaggcngtccaaagggcag

SEQ ID NO: 2034 - DNA, 3238 bp, Listeria monocytogenes-4B
gtcgcatggagtcgcgttatcccgcatggggacggggaagttaacgaagcaggacttaaattctatgataatttgattgatgaacttctttcttatggaattgagccagtcgttacactttatcactgggatattccgcaagggcttcaagacgaatatggtggatgggagtcgcgaaaagtcgtagaagatttcactaactacgctgcccttctattcaaacgctttaacggccgagttaaatactgggtaacacttaatgaacagaacgtatttatctcacacggttacaaattagcgtatcacccacctggcgtttctgacgacaagcgtatgtttgcggcaaatcacaatgcgaacttggcgaatgcttctgcaattgctaaattccgcgagctaggtacatccggaaaaattggaccaagttttgcttatggaccaagttactccatcgatgctaacccagcaaatgtattagcttctgaaaactccgaagaattcaatgcccatttctggatggatgtttacacatggggtgaatatccgactgctacttggaactggctggaagagcacggtcttgcaccggaaatcttaccaggcgatacggagcttctgaaaaaaggaaaacctgatttcatgggagttaactattaccgctcaatgactcatgcatttaatgggaaagacggcgttggttctgggaaaatgaatacaactggcgaaaaaggcacttccgaggaaactggtgtaccggggttatacaaaaacaccaataatccatacttagagaaaacgaattgggactgggatattgatccaactggcttgcgcattggcttacgtagaattactaaccgctataaattaccaatcatgattacagaaaatggtcttggtgagtatgatagcttgacggaagaccataaaatccatgatgagtaccgaattgaatacattcgcgcgcatgctctagcaatccaagaagcaatcacggacggcgtagagatgctcggttactgcacttggagcttcacagatttactaagctggttaaacggctaccaaaaacgttacggtttcgtatatgtagaccgcgacgaaaacgatgaaaaagaattaaaacgctataaaaaagatagtttttactggtataaaaagaccatcgaagcaaacggagctaatttagtagaagaacagggcaaataagccttgttctctctgcttcaaccattttgggagggaaattttaatgaaaaaaatattacttgtatgtgcggccggaatgtcgacaagcttactcgttactaaaatgaaagcgcacgcaacctctattggggaagaaattgaaatcgaagcattaccagtatcagaagctagcagcgttgtggacaaaatggatatcgtgatgcttggacctcaagtccgttaccaaaaaccgcaagtagatgaactcgtacagggtcgcattcctgttattgttatcgatatgaaagattatggtatgttaaacgggaaagccgttcttgaaaaagctttcgcggagattggttaagggagattcattcaaaatagggaggttttaaaatgagtataatgtcaaaatttgaacacggcatggaacgtgttttagtaccagttgcgaataaattgaactcgcagcgccatattgcagcaattcgtgatgcatttattttagttttcccattaattatggctggttcaattatcactttgattaacttcgcagtattatcaccagatggctttattgcaaaaatcttattcctagggaaaattttccctaatttagccgatgcacaggctgtattttcgccagtaatgcaaggttcgaccaatattatggccattctgatcgtattcttagtcgcacggaatctcgccatcttctttaaacaggatgatttgctctgtggactgacctcgataggtgcattctttatcgtgtatacaccttacacagtagttgacaatgcatcttacatgacaatcaaattcttaggagcacaaggtcttttcgttgctattattgtagcgattattactggggaagtatttagccgtctagctagatcccctcgtttaatgatcaaaatgcctgaccaagtaccaccagcagttgctcgttcttttaaagtattaattccagttatcatcatcactattcttttctctgtcattaactacttaatcactttaatcgctccagaaggtttaaacgaccttgtttacacagttattcaagcgccacttaaagacatgggaactaacgtattctctgtaattatcatcgggcttgtttctaacttactttgggttcttggtattcacgggcctaacactgttgcggctattcgtgacaccatcttcactgaaccaaacttagataacttatcttacgtagcacagcacggttctgcttggggagctccatacccagcaacatgggctggcctaaatgacggatttgcaaactacggcggatctggtgtgactctaggtttactgattgctatctttatcgcttctcgtcgtgcagactaccgcgatatcgcgaaactttctcttgcaccagggattttcaacatcaatgaaccagttattttcggtttaccaatcgtattaaacccaattatggttattcctttcatcattacaccagcaatcaatacattaattggttacttctttatctcaacaaaacttattccacctgtcgcctatcaagtgccttggacaactccaggaccactgattccattccttggtacaggaggaaactggctcgcgcttctggtcggcttgctctgtctagccgtcgcaacagtcatttatctaccattcgtacttgtatctaacaaaattgccgcgagtgatgctgcaatggacaaaaatgcaacagcctcaacagaacaataggatgtgacaaaatgaaaattgcagcttttgatatcggtggaacggcccttaaaatgggggtcgttttgccgcatggtgaaattatactaacaaaatccgccgaaatcagcggtagtgatggcgaccagattttagcagaaatgaagctatttcttgctgaaaatacggacgtgacaggaattgcagtcagcgcgcctggctatgtgaacccaaaaaccggacttattacaatgggcggcgctatccgtagatttgataactttaatttgaaagaatggcttgaagcagaaaccggaat

SEQ ID NO: 2035 - DNA, 3221 bp, Listeria monocytogenes-4B
acccaaacacggacgtactcaaaaacatttcactaaaagcttctccaggccaaacgattgctattctgggtgaaactggcgctggaaaatcaacactcgtcaacttaatttgccgattttacgatccgacttccggtgaaattttaattgatggtgtcgatgcacgaaaatggcatgtgcgggaacttagaaaccatatcgccacggtgatgcaagatattttcctattttctgatacgattgaaggaaatattgcatttggcgctccggatgcaacaatggaagatgtccggtgtatggcgcgaattgcagacgcggaccacttcatcgaaaccatgcctgaaagttatgacacgattgttggtgaacgcggtgtcggactttctggcggacaaaagcagcggatatctttagctcgtgctcttttaaaaaatccatccattttgattttggatgataccacttccgctgtcgatatggaaaccgaagtgaaaatccaaggtgaattaaagaaaatcacggaaaatacgaccacatttatcattgcgcaccggatttcttctgtaaaagaagccgatgaaattttaattttaaatcatggcgaaatcatcgaacgcggcacacactctagtttgctagcagaaaaaggttattattttgatatttacaataaacaacttggaacggaggcgaatgtgaatggctagaaataaatttgatattgacgaagaactggaaacagcattcagcgccgcacatttaaaacgtattctcgtttacgtaaaaccctatcaaaaatccatttatattacgctctttgtcatcttattagcaaatgtagcaacaatgattggcccgtatttaaccaaaatagtcatagatgatacgattccaaacaaaaacatgacacaactattctggattgcgattattttcatagtttctgtcgttgtaaccggactttgtatgcgataccgcattaggtcgattacgcttattgggcaagacattttaaaagatatgcggacagcgattttcggtcatttgcaaaagctgcctttctcttattttgacagtcgcccgcatggtaaaattttgattcgtgttgttaattacatcaatatgctcagtgatttattgtccaatgggctgataaatctgatttccgatattttaagtgtcattgtaacgcttggttttatgttgatgattgatccagtgttaacgttgtatagtttagcgcttatcccggttcttttcgtgattgttatggtcattaaaaccgcgcaacgaaaagcttatcaagttctaagcaataaacaatccaacatgaacgcctatatccatgagagcatcgctgggataaaagtaacgcaaagcttttcgcgagaagaagagaattttgagattttcaccgaggtaagtaatgagtaccgccgttcttggatgaaagcggtgaaaattcaattcttgctttggccaggggttcaaaatatcgccgtaatgacgacttgtttaatttacttcgttggaatcaaaggttacggtgtggacgtttctaccgggacactgattgctttcatcggttatgttgggaatttttggaatcctgttattaatattggtaacttctacaattcgcttattaccgcaacgacttatttggagcgaattttcgaaacgatggacgttgagccagatattaaagatgtcccaaatgcgaaaaaaatgccaccaatcgtcggaaatgttgactttaaagatgtttatttccgttacgaggaaggtgtggacattttaaaaggaattaattttcatgtggatgcgggtgaatcaattgcgctcgttggtccgactggcgctggaaaaacgaccatcataaacttgctcagccgtttttataatataaattctggagaaattttagttgatggggaaaatgtcgaagaagtcacgcttagatcactcaggtcccaaatgggcgtgatgctccaagatacctttattttttcaggaacgattattgaaaatattcgctacgggaagctagatgcaaccgaagaagaaattatcgcggctgccaaagtcgttcgtgctcatgatttcatttccggattaaaagatggctactataccgaagtaaaagaacgaggtagcactctttcggccggtcagcgacaactgatttcctttgcccgtgctcttttagccgatccgaaaatcctcatccttgatgaagcaacttcaagtattgatacacaaacagaaatcctactccaagaagggcttgagcgactgttggaaggccgaacatccttcattatcgcgcacagactttcgacaatcaaaaacagttcgcgcatcttctacattgataatggtcgcattcaagaagctggcagtcacgaagaactgatggcacagcacggctactactataatttatatcaatcacagtttgatatgttgcaagctttatagaaaaaaggtaactagagattctagttaccttttattttgcgcatccatttgtaaaaagaaattatacaatgctccgtacaaattcgcatcattttggaaatgacaagtgacgattttcggttgtgcggcatgataaggattagcatcttttatttctgcgacagcttcgtttagtctatcaacaacaactggttgagcgctaatgccaccaccaattgcaataatttccggatcaatcaaatactggatatttaaaatttgagatgttaattcataaatatacacatcaaaaatagcattcgcttcttcatcgccttggttaattaattcgaaaacctgctcaccatcttttttattgggtaaattcttctttgatgcaatgcgcttaattaactccaccgctgatccagttcttccaaagaatgtacctcgcaatttcttcgtatcaaaagaagtctccataaaactaacttctcccgccatcaaatgatagccagattgtaatttaccatccataataattccgccaccaacgccacttccaagcgttaaaatcgccgcgctatgtacattttttgccacacctaaccaaagttccgctaaagccgcactcttcgcatcattttgcaagacaacgggaacatgacattcacgcgctagcatttcagccaaatttttctcatgcataactttccagcacactggtggccgctcgaacgtgcagcggccgtcccaacgat

SEQ ID NO: 2036 - DNA, 2325 bp, Listeria monocytogenes-4B
  misc-feature (1)..(end): n can be any nucleotide a,g,c or t/u
gtactatggtcaaattattacttttacgtatccacttgttggaaattacggtgtgaaccgcgacgattttgaatctatcaatcctgctgtgaaaggggttgtggttcgtgaagctgcagaatttccttccaactggcgcaatcaaattactttagatgaatttttgaaagaaaaaggcatcccgggaatcgcgggaattgatacgcgtaaactaacgaaactaattcgtaaagaaggaacgttaaaaggcattttagcagctgaaactgcaaacaaagaggaattgctacaccacttgcgctctgtacgtttgccagtcgatcaagtacatgaagtttcctctgctaaagcatttgcaagcccaggagatggtaaacgagtggtgcttgttgattatggtgtgaaaagttcaattttacgggaactgaataaacgtaactgttacgtgacggttgttccttacaacacaacagccgaagaaattcttgcaatgcatccggatggcgtgatgttatccaatggacctggggatccgaaagatgtgccagaagcattagaaatgatacgcggcattcaaggcaagctcccactattcggaatttgcttagggcaccaactgtttgcacttgcgaacggagcagatacatttaaactgaaattcgggcatcgtggcgcgaatcatccggtgaaagaactagccactggacgtgttgatttcactgcacaaaaccacggttacgcagtagaaaaagattcacttattggaacagatttaaaagtaacacacattgaattaaatgatgaaacggtagaagggctggcacataaagaatatccagcctatacagtacaatatcacccagaagcaaacccaggaccaagtgacgtcaactacttatttgatgaatttatggaaatgatgaatgggaaagaggagggtgaactacatgcctaaacgtgacgatataaaaacaattctagtaatcggttctggcccaattgttattggacaagcagcagagttcgattatgctgggacacaagcatgcctgagtttgaaagaagaagggtaccgggtagttttagtgaactcaaatccagcgacaattatgacggatgcagaaatggcggacaaagtttacattgaaccaattacgcttgattttgtatcgcgcattattcgtaaagaacgtccggacgccattttgccaacgcttgggggacaaacgggattgaacatggcgatggaactttcagctgctgggattttggatgaatgtaacgtagaagtgttaggaacagatttaacggcgattaaaaaagcggaagaccgtgaagctttccgggacttgatgaatgaactaggggaaccagtgccagaaagtgacattattcataatttggacgaagcgtatacttttgttgaacgtatcggctacccagttatcgtgcgcccggcatatacgcttggtggttctggcggcgggatttgccacaatgaacaagaattaattgaaacggtgacaagtggtctaaaactgagtccagtaacacaatgtttactagaaaaaagtatcgctggttttaaagaagtggaatatgaagtaatgcgtgatgcgaacaataacgcaatggttgtttgtaacatggaaaatattgacccagtcggcatacatacaggagattcgattgttgtcgcaccaagccaaacgctttccgaccgcgaataccaattgttgcgcgatgtgtcgttgaaaattatccgtgcactagaaattgaaggcggctgtaacgttcagctggcacttgatccagatagttataattactatgttatcgaagtaaacccacgtgtgagccgttcctctgcgctagcttccaaagcgaccggctacccaattgccaaacttgcagctaaaatcgcagttggcttaacactggatgaagtgagaaatccagtaacaggaacaacttttgcccatttcgaaccaacactagattatgttgttgcgaaaatcccacgctttgcttttgacaaatttgagcaagcggatcgtcgccttggaacacaaatgaaagcaactggtgaagtcatggcaattggccgttcatgggaagaagcacttctaaaagcagtgcgctccctagaaattggcgctgaccatttgttgcttgaagaagcggaaaatgctgacgaagcaacattagaacgcanaatttgcttcccagaagatgatcgtttattcttcctagcagcagctttgcgccgaggtcaaacaatcgaacaactccacgcgaaaacaaagatagatttattcttcttat

SEQ ID NO: 2037 - DNA, 3156 bp, Listeria monocytogenes-4B
aaagatgatgtgaaactttttgccgaaatgggcttcaaggttttccgtacttccatcgcttggtcccgtatcttcccaaatggtgacgaaactgagccaaacgaagcaggattacaattttacgatgatttattcgatgaacttctagcacataatatcgaaccactgattactttatctcactatgaaacaccacttcacttatcgaaaacttacgacggctgggtaaatagaaaaatgatcgacttctatgaaaactatgtccgcaccgtatttaatcgctataaaggcaaagtaaaatattggctcactttcaatgaaatcaactccattttacacgcaccattcatgagcggcggtatttctacaagcccagataaattatctcaaaaagacttatatcaagctgtccaccacgaacttgtggcgagcgcgctggctacaaaaattggtcacgaaatcatgcccgaagcccaaatcggctgcatggtcctagcaatgccaacttatccgctaacttccaacccagatgatattattgctgttatggaagcagagcgcaaaaactacttcttctccgacgttcatgtccgcggaacttatccgggctacatgaaacgctatttcagagaaaataatattgaattagacgtaacagaagaagacctagaaatccttaaaaacacagtagatttcatttccttcagctattacatgagcacaaccgaaacagctgacgagtcaaaacgcaaagctggcgcaggaaacatcctaggcggcgtgcacaacccttacctagaagcatccgaatggggctggcaaatcgatcctcaaggcttgcgcgttgtcctaaacgaattctgggatagataccaaaaaccacttttcatcgtagaaaacggtcttggcgctatcgatcaactagaaaaagacgaaaacggcaactacacagtaaatgatgactaccgtattaattatttgagcgctcatttatcgcaagtgaaagaagcgattaaagatggcgttgacttgatgggttacacttcatggggctgtattgaccttgtaagtgcctccactgctgaaatgaaaaaacgttacggctttatctatgtcgatcgcaacaacgacggcacaggtacgctaaaccgttataagaagaaaagttttgattggtacaagaacgttattgctaccaatggtgaagatttataaaaatgagaaacccaggtttgccctttttaagaggggtaacctgggttttttaattgcttgataacggagtagcaatcatccgaccgagttatcgctgaaataaccgataccccgtccgcacctgctgtgagaacctcagctgaatttgtttcattaattccgccaatcccgacaattggtagcttaattccagcccggcgaatttcttccaaaattgccgttccactcactggctctgcatccgcttttgaaatcgttggaaaaatgggccctacaccaatataatccaccgcaccaagtcgttctgcttcctccgcttcactaaccgaatgaaccgaaagtccgattttcatttttccagcgcaactcgcgataacttggcgaatttcctcgtcgttttgcccgacatggatgccgtccgcgccgatttcgagggctagggcgacatcatcgttaataatgaatggcacttgatattttgcgcataattgttggcattctagcgccatttcttttctttcggaagcagtttggagtgagcctgctcctttttcgcgatattggaaacaagtaattccggctttcagtgcttcttctaacacacctggcaacgttccacgaacaatatcttgcgttccagcgataaaatatacagctagttcagctctcatttcccatcctccaatcggtaggcaaaatggttggttggaccatgaccgtgaccaattccaagcggatatttaatcgcacttgtgataaattctttcgcaaccatgacactatccaaaagcgaattccctttcgcaagttcagctgcaatacatgccgaaaaagtgcaaccagtcccgtgcgtatgcggcgtatcaaagcgctcgctcgtcagccattttgtcgtttcgccatcatagtaaaaatcagccgcctcactcatttcgctatgcccacctttaataacaaccgcttttacacctaaatcaaaaattttcttagcggcttgttcaatttccgccttggttgtgattttttcaccaagaatttcttccgcttctggaatattcggcgtaatgatcgtaccaagtggcaaaagctcgtctttcaacacttgggtcgcctcgttttcaagcaaagcagttccaccttttgcaatcatcacaggatcaatgacgatatttgggaagttgtgcaaacggatattccgcgccacttcccggataatttctgcatctgctagcattccagttttcacggcgctcacttgaaaatcctctgcaatcgcgtcgcactgttcgcggatcatttctaccgggattttatgcactgcttttacacctagcgtgttttgtgccgtgattgccgtgatgacggacatgccaaaggttttacgctcttgaaatgtcttgatatccgcttgtatccccgcgccgccgccagaatctgaaccagctatcgttaatacttgtttgaaaatcatttgtgttcaccactttcttggattttggctttggcccgcgttttttcgaccgaccaactagcaagagcatctaaaaattgtggtcgaaatgaacctggaagttttctttctaattcgatttccgcgtactcagaagccaccgcataactcgcgcatgcttcgacactagctcgaaaagcatcatcctgaacggccataaaactaccgcaaactgcactgagcaaacaaccagaaccagtaattcttggaagcagtgcgctaccattagccacttttgcaaaacgcgttccgtctgaaatcacatctacttcgccgctaataataacaaccgtgctccattcattcgccactttttcagcaatgctcagcacatccgccgaaccaacacccgcatccacgcctttcgcttccccagcttcaccagcaatcggcgcaagctctcccgcattttcacgaatcgccgcaaaatg

SEQ ID NO: 2038 - DNA, 3970 bp, Listeria monocytogenes-4B
  misc-feature (1)..(end): n can be any nucleotide a,g,c or t/u
tttgctcgtacattatggccattgcagtgattgttatttttatcccacctgtgcagttatggtgccaattggttcagagcaatctgtgccagtcgctgaagtattgccaatagcctttatgggttcggcggcaatgttcgttggcattgtaacggcgcttcttgcaacataagtattcattcgtctttctaagagtgagaaaatgaaaatccatatttctggggatagcgtacctccagccgtaattaaatcattcaatgtgcttattccgacaatgttaacaatacttatttttgcgtttatttcattcttagtagtgacattattcagcttgaatttgtattctttaattagcgcaattattcaagaaccattaacattcttagttacaagtgttccagggttcctaacgttaatgacgatttcacaaatgctttattctatcggtattgctggaagtgggattttagggccgattatggacccagttcttttggcaaatatgcaagaaaatatgacagcatttgcgaatcacacagagattcctcatattattaatactactttccgtgatgtttttggcgttatgggaggcggcggaaatactattgcgctgttaatagcaatttttatttggtcaaaacgaaaagattatcgcgaaatagctactttatcggcagctcctggtctatttaatatcaatgaaccggtagtatttggccttccgattgtttataacttgagtttgatgattccgttcattatttcaacaccgctttgcttatgtttagcctacttcgcgacaaagctgcatatgatttcagaagtagtcgtaatggttccgtggacgacaccagttgttgcttccggcttccttgcaacaggtggggactggcgtgctgcagtattccaaattttcttgattggcgtctgcgtacttctttacctaccattcttaaaagccaatgacagaattaaagcctaattggagggatttttatgaaaaatattatgttgatgtgtaatgcgggaatgtctacaagcgttttagtgaggaaaatggaacgcgttgtagaagaacgtaatttagaactgactatctgggctatttcagaaacggatttcgaaaaaaattggcgtaaagctgatgcgattttacttggaccgcaagtgaattatatgaaagataaggttatagaaacagttggtgataatgtatcggtggcagttattgatatcgttgattatggtcgaatgaatggtgaaaaagtattagatttagcaattagtttattgtgacattcttagttttttagcaaggaggagaaagaatatggctgtttatttggataaggagaaaccagtttcagaacgtgtagaagacttactttccaagatgaccttagcagaaaaatgtggtcaactaaaccaaagaatgtatggctgggaagctttttcaagagatggcgaaacgtttcatatcacggaaaaatttaaagaggaagtaactagatttgaaggtataggcgctttatacggtctgttccgcgctgatccatggtccaaaatgaataaggacacgggtgtaagtcggaaaaatgctggcaaagtagctaataaaattcaacgctatgtgatagaaaatacgcgcctagggattcctgtactattagctgaggaagttccgcacggtcaccaagcgttagatagcgaatcttatccggtaaatttagctcgtgctgcttcttttaatccagagttgcaaaaacaggtcgcaagtgcgattacagaagaaatttccgaaaagggagttcatctagcacttgcttcagcattagacatacttcgagacccacgttggggacgcgctgaagagtgttacggtgaagatccataccttgcagcggaattaacagcggcaattacagaaggctttcaagcgagtgggaagattgctgttattttaaaacattttgcggcacaaggcgagccgattggcgggcataattctggaccagtttctattggcgtaagggaacttagagaaattttcttggaaccaatgcgcgcgggaattagaagtggtgcccttggcgtcatggcagcttacaacgagattgacggggtgccatgccacgcgaacaaagagcttttaacaactattttgcgagaagaaatgggattctccgggattgttatggcagatgggtgtgcccttgatagattattaaaactaaatcctgatccaaaaaaagccgcaaaaatggctcttgaagccggtgtggatttgagtttgtgggatgaagtgtttccatttcttgaagaaagcgtggaaaaaggcattcttgatgaaaaggtcgttgatgatgctgtgaggcgagtgcttcaagtgaaattccaattagggctatttgaacaaccgtttgtagaggaagaaattcaagcaccgaagtctgattggaaacaactaaatttacaagccgctagagagggtatttgtcttttgaaaaacgacttcgaaacattacctctagtaggcgaacggaaaaaaatagctgttgttggtcctagcatagatgcgctttataatcagttgggagattatacagctccgcaaaatgaatcagaatgtgtcactgtgttagaagggataaaaaaactgcttcctaaaaattgggaagtcgtttctgaaaaaggtactgaaattcgtgaagagcttccggatggcattcaaagagcagaagtggttgctaaagaggcagacgccattgttatggtgctcggtggttcaagtgcgcggaattttgacatggaatttttaaataatggcgcggtaagctctaagggcccgaacatggatgccggtgaaaatgtggatgttgctgatatcacgcttccacaaccgcaattagatttgttttacgcaatgaagcgtactggaaagcctgtaattgtcgtaataattcaaggtagaccaatcgctatcccagaaattagttcgacagcagatgcgattctcacagcttggtatccaggaagtgttggtggaacggcgattgctgaggttcttttcggtcattacaatccttcaggtaaattaccagtcagcataccaagatcctccgggcagattcctatttactacaatcaaaaggcagtggagtataaagaagactactttgatttaactggtaagccgctctatccatttggctatggtttaagttatagcgcttttgaatatcaagatttacagataaaacaagaatctataaaaatagcagaactccttggcgggcaatctgtagaagtgaaagtaactttaaaaaacacctctaatgtagccggtgaagaagttgtgcaactttatcttcatgatatggaagcaagtattactagaagaaaaaaagaattaaaagcatttaaaaaggttcgtattgcagcgaaacaaacagctacagtgacatttaagctagataaatcaagttttgaaatatggtcaattaacaataaatatgaggtggagcccggtggtatagaaattttcgttggtggaagttctgatactaaattaacagggcgagtttcaatcataggaggctagcgaaaatggaaggaatggaactcgcatcatttcaaataattagttctgttggcgccgcaagaagttgcattattgaggcgatgaaattcggaagacaaagaaaattcacagaagcatataaaaaaattgacgaggctaatgaatttcttagcgaaggtcataaaaatcatgtgcaactaattcaaaaagaggcagatgggggagacgtacaaatttctatcctcttcatgcacgcggaagatcaatttatgactacttatacattacgcgatgtagcttatgagatgattgctatttggaaagagatgaagtaattaaaacgaanatcctttactgattaaagggttttcgttttttggtggggtg

SEQ ID NO: 2039 - DNA, 3908 bp, Listeria monocytogenes-4B
catccaaccgtgcgctggaaagaatgtgaagcatacaatttaccacaaggtgtaattacgcggttgtatcgtgaaattgcagctaaacggccaggcgtgattacaaaaattggcatgggaacatttgtagatccacgtattgaaggggcaaaaatgtctgcgagttctaaagacaacttagtagagctattgacgatcctcgacgaagaatggctattttatacaagtttcccaattcaagttgcgctcattcgaggaactgtggcagatgaatttgggaacttaacgttagaaaaagaaggcttacatatggaagtcttaccaattgcacaggcagttcgaaattcaggcggaattgtaatcgctcaagtagaatctgttgcgaaaaaaggatcgcttaatcctaaagatgttagagttccaggaattttggttgatcatattattatttcagaaccggaaaatcattttcaaactgaaaatacacagtacaacccagctttttcagggcatattcaagttccgcttggagatattgagccacttccgttagatgaccgtaaagtaattgcgcgtcgttcagcagcagaactagaaccacaaactattctaaatttaggtgtaggaattccggtgaacgtatcaactgtagcagcggaagagggcgtgagtgatcaattaatactaacaacggaagctggttctgttggtggtgttccagcaggtttagcagatttcggccatgcttataacagtgaagctattgtcgatcatcattcgcagttcgattttttcgatggtggaggactcgatttatccgtacttggtttggcgcaaaccgacgaatccggtaatgtgaatgtcagcaagtttggctcaagagttgctggctgcggtggatttattaatatctcccaatcagcgaaaaaattaatttttgccggaacttttacagcaggtggattaaagacgcgtgtagctgacggaaaattagagattttacaagaaggaaaagctaaaaagtttatcaaacaagttcaacaaatcacatttagtggcgaatacgcttcaacgaccgaccaaatcatcctctatgtgacagagcgagctgtattccgtttagaaaatggcaaaatggttctaacagaaatcgcgccaggagtagatttagaaaaagatatccttggacaaatggaattcgaacctgttattgcgagtgatttaaaagtaatggatagcggtatgtttagtgaacaatggggcggcttaaaaactattattgaaaaacaaacaagagagggagtatctatatgacaaaagaaataaaccgttggggagtcttaattggctctgttggtgttctgctttgtaccggtgcggtatatgcatttagtgtttttgctggaccgctaagtgccgctcatggttggacaattccgcaagttatgatggcatttacaattaatgctgcgattggaccgattccaactattttaggtgggattttaacggataaagggaaagcaaaatgggctattttaattgggggaatcctgtttgggcttggttttgcgttaacaggatttgctacttcaacgacgatgctttatttgtcttatggtgtccttgctgggcttggacaaggttttgcgtattcaggatgtcttagtaacacgattcgtcttttcccagataaacgtggtcttgcttctggacttattactgcaggaatgggtggagcgacaatcattgctgcaccgattgcgaaccacttaattgaaacatataacgtaatgacagcatttaaaattatgggagctgtttatatcgcagttgtcattggatgtagtttccttattcgcgtcgcaccagctggttatgcaccaaaaggttggacaccgcctgctaataatgcagctggtatggtaaatgtaccttggacgggaatggttcgaacagttactttttatctgattcttttaatgctaggtattggcgcattttccggtctgatgattgcttctaatgcatccttaattggtcaaaatatgtttggcttgacggctgcatcggctgctgcttacgttagtatttattcactaagcaactgtttaggtcgagtagtttggggcgctgtatctgaccgtctaggtagatctaatacattgatgattatctatacagtgattgctttatctttactagcacttgcaacgcttcaatctgttgttggatttgttatcggaattattggacttggactttgctttggtggaacaatgggcgttttcccgtctatcgttatggaaaattacggtccgaaaaatcaaggcgtcaactacggaatcgtcttcattggttattccacagcggccttctttgcaccaaaaatggcagcgcaaatcgccggtcaaaacggtggcgacttcacacaagctttctatatagctatcgcacttgctgctgtaggactttgcattaatattgtttataaattacgtgagaaaaaacaaccaactaaagaattagcgtaaaaatagagaggagaaaagaaaatgagtttaactgaaatgctacaaatcaaatatccaattttacaaggggcaatggcacaaattgccacatatgaattagcttccgcggtatcaaatgtaggtgggctaggaattatcgcatcaggtggaatgtcagcagacacattacgagaacaaattcgcctttgtaaagaaaagacaacaaaaccgttcgctgtaaatatcatgctgatgatgccaaattgtccagaacttgtcgatgttattattgaagaagatgtgcgagttgttacaactggggcaggcacgcctaaaccatttatggaaaaatttaaagcagctggaattaaagttatcgccgttatcccgtctgtgaaaattgctcaaaaaatggaagaaatcggtgtggacgctgttgttgcagaagggacagaagcaggtggacatgtcggagaaacaacaacgatggcactcgttcgtcaagttgtttcagcagtaaatattcctgtcattgcagcaggcggtattgcagatggtcacggaatggcagctgtttatgcgttaggcgcaagcggtgtccaaatcggcacacttttccttgttgctgaggaatgtccggttccagctagctttaaacaagcggtacttgacgcaacggatacaagtacgactgtaacaggtcgtcgcaatggtgcgccagttagaagtattaaaaacccaatgattcaaaaatatgttgaactagaaaacgaaaatgcctccagagacaaattagaggaattaacacttggctctcttagaaaagcagtacatgaaggtgacgttgagaatggttcagttatggctggacaaatttgtggtatgttaaaagaaattcgttccactagtgatattatcgaaagcctcatgaaagaatctaaacaagttgcaagcaatttagtgattcaataataaaaagagtcagtaatatcctggtggattttgctgactctttttttatttacgtcgatacatttttgttaagtctaccatcaaataaataagtagaacagctgtaatgatgacagcgataaggcttgctatatcattatggaataaaatactgattccattaattgctagtgcgatcaaaattataataaaatattttcccattaagcttctccagttcttctaattataaagcgccatcttgaatgatttctgttttataaccatctggatctgttaagaaataatagaatggatcttcgccaggtagtccttttaaatctgtcacagtaaaaccagcttcttggtgttcttttaataaagcatgtacgtccggaacaccaactgctaagtgaccataaccatttcctaaatcgtaggctt

SEQ ID NO: 2040 - DNA, 5553 bp, Listeria monocytogenes-4B
  misc-feature (1)..(end): n can be any nucleotide a,g,c or t/u
gacactgtaactactgctgctcgagcgccgacgtgtgctggaaagtagtacttggaaatacagtttgctacgtgtttgtgcgccaatgatcgttcttttcttccacggggcagttgctggtgtattcggtaactcaactggtggggtgagaggagccttgataggtggatttttaacggctacggttgttgcttggggacaatatattatggttacctttnttancaatacgagtgtttcagatacagcaatgtgggcagccgacttatatatgtttatcctctgaccaattgtcaccatgttagcgaagttattcttttaagtaaaatctaaacctcttccttgtctagcattcaagaggaagaggttttttgaaaggaagttttaaaaaatgagttttattcgtactttttatggagatattgcccctgaacaactgggcttcacttattcacacgagcacatcgtttgtgtaccagcttactggcaagagcgagatgccgatgatttactttggaggataaagaaaaatcacaacttgatgtacaagatttcgccgatttaggaggcaaaacaattgtcgatgcaaccgcggttgattacggcagacgcgtcttagatgtggcgcaaatttccaaagaaacaggcatccaaatcgttggaacagctggctttaacaaaagtttcttatgggacgggaagattaaaccagaactgaaaccaatcatcggggattttgaaacctactatgaatggattgaaaatactactacagacaaactaacggaattcgttgtaaatgaagtcgaaaatgggcttgaaggaacgccgtataaggctggtcaggtgaaatttggcactggctacaatatgattacacctttagaagaaaagacaatacgtgcggttgcaagagcacatcacgagacaaaagcaccaattcattctcacacagaagcgggaacgatggctttagaacaaatcgagattttaaaacaagaaaatatcccgttagaatacctttctattggtcatatggaccgcaacctagatccgtattatcacaagcaagttgccaaaacaggcgcattcatgtcatttgatggcatcgcaaaaatcaaatacgcaccagaaagcgctcggattgcagcgattctatatctagtttcggaaggctttgaagatcaaattttagttagtggtgatacagcacgcaaaacttattataaacattatggtcacggaccaggacttgaatatatcgccaaaaaatgggtgccacgctttattgatgaagcaaacgaaaaaggctttgacggagaaaaattagttaaaaaattcttcgtggataacccagcaagatgttttacttttaaaaaataggaggcgaaatctgtgttatatgcagatgaaaattcatttgatattggcgcgaaaatcacgaaaacaaaaccagtccttttgccaataggagcagtcgaagcgcatgggccgcatttgccactagggacagacaatattttagcgtcagaatattcagcgaaaatagcggcggaaacagatggattcgtgcttacggttttgccatacggccaagtttggagtttgcaagatttccctggaagtttaacactatcaaatgaaacggtaacgaaagtagttgtagagattggtgaaagtctatataaacaaggattccgtctgtttgtcccagtgagtggacatcttggccatatggctgcgctaaaagatgcagctcgcgaactatatgcaaagtatcctgatatggttatcttgcacattttttacccgaatatccaaaaattagcaatggacgtgcgcgaaggaaaagctaaccatcatacgtatattcatgcctgtgaaatcgaaacatctctcatgctctacttgtccccagaaaatgccgatatgagccgcgctatagatgatccgccaattttaccaatcgatgcggatttcaccccaacaccgtggcaaaacttcacgaagacagcggttctgggagaagcaactttggcaacagcagaaaaaggcgaatacttgattgaaaagacgttaaaaacatgtgtggagttgataaaacttgaacaagaaaaaattcgaaaatctaccgaaatggaataattttgcgctatttaattttttagcgaaagataaggaaaatagcctggaagtcatggaggcggcgcgcggttttgccgttccgggaatcgttgcaacgaactacgaaacagcagaagaagccgcaaatgtggtgaaagaattacaaacaacagcccccgtcattagtgttggtcttggtggcggtggagactggcaaaactggcgtgatgtgcttcatattgctcgtctggctccaaacagtcatattaaccagccaatcgaaaccgcgggattaacaaatgacttacttgcggaaacatacactaatgcactcgttcgtgcaaccgggaaaatcggcatcgtcaaactatcttccggagacgaaattaccgctgaggaagctgtcgattattgtctatccgccaacatcccgtccatcaaatttatgagcattgaaggcacgaaatatttagatgaactagtttacttaacaaaaattgcggccgataaaggcatttctgtattgagcctgcgggaggaattggagctgacaatattcttgatataacaaccgccatcaagtccaccggaattcccttttatatgccgcatatttttggaaaaacaattgacaaagcaactggccgaacgaaaccggaagaaatcgagaaaatttttgcagctttggaggggaattaaatgattaataactatatcgatattacagttcgtttattagaaaacattctcgataatgaagctgattatgtaaaagaagcaggagcgaaggtagccgagtctattgaaaacgacggggtaatccatttatttggttgcggtcactcgcatattttaacagaggaagtattttaccgcgcaggtggactggctgcgattcatccgattttgcatgaaccacttatgcttcacgaaggagctgcggcgtcatctgtactggaacgaaaaaatgattatgcgaaaacatttatggcagaggaagatatccgtcctggcaatatcatgatgtgctatcgacgtccggacgaaaccctgtaccaattgatgttgctgaaattgcccgtgaaaaaggtgcatttgtcatcgtcattacttcgctccaatactccgctagccaaaaatcccgccacacatccggaaaacgtatatctgatgcaggggacattgtaattgataacggtgctgtcaaaggtgatgccgtcttaaaatcggcaaacttcgatattgcatttgccccaacatcgacggtaacgggcgcagtcatcttgcaatctatttttgcagaagcaatcgaaacaatggtaaacgacaacttcacaccgccagtatttattagtggaaatgtcgaaaatgccgatgcacataatcaagcacttgttgataaatataatgagcgaattccgcttcttggaatgaatttataagaaagaaaagtctaggttagcacctagacttttttactatgttagagtatttctatagattgcgatataattaaactatataaaaatgataaaggagtgcggccgatggattcagcaaatgtatttgatagcgaacaagcaacgaaattattaatgaagaactatgaattagtaaaaacgagtggcgttagttttattgataaacgaattcgatttctaattgctcgtctttttgcggggaataatgaagtggttaatccagaggaatttagtgaaataaataaagggattgagggaccgctaggcaagttcactgcagtgaacggaaatgttcgcgcacccttggtaggattgctcatgccgaacggataatgccagccgagagagcgtccggcaagtaattgctaattataatacattgatccaagcgggattccagcgcccagaatacacttattttgcagcatatttattactagaatcagaaaatcccaaaaagccagcccaaaaagcgaaaactattcaccaccttttcaaaaaagcccatccatttttaactaaaagtgaagatgtgacaacagctgttttcttagcaaatcttcctgaagaaaataccacgaaattggctgaaataacagagtactattttcaagagttcgccgcgaaaggtttccgcaaaaatgatagcttacaattcttagcaacaacagggacacttttgtacggtgaaaaagatagcaaattcattcgaagagtagataatattgtagaagaactacgacaaaaagggataaaagtaaaaccgccacattactcaagtattgggattttagcttttgtcatgcacgcgcgaaaaatcgattcagggttagtgaacttaattgatgaattacagcaacaaccaggcccgcgtttcgtacgagaattcgttacagctctagcaataagcctatatacgtaaaaacaatcaggtcaaatgagtaaggaacaattagaagggttaatggtcaatgtgcatatattgattgcaatggaacaagcagctgcggtgagtgcagctgcagcagcgagtgcggcagccgcatctagttaatacataaaaactggtaagccataacggctaccactttttttatgatttaaggactaacataatagtcattacttttcttaggcggattggatgaacttaaaacgtaatctttcaaaaatgaattcggtgcagaatcccataaagccataccatcagattttggaggggcagttccggcgaagaaatacatgttatttaatcccatcgtatctgccattttttccttatccgcttggttgtacttatcataagattcatcggtcattaaatccatcattgccttatcgtagccactattataaaaagtttcgtaatcaaattgattaaaattaagcaagttttcatccgtagagccttgcgcttttgcccaagcttccatatctaacttttgagattgatacgtgaagtttttgtttttggcactataagtaatattgccatatttatgcgggaaaacagaaagagcattggttacgatatcggtaatttctttgccatctgtgcttttcgcagagcggatattttgcgtatgaatatggccacttagagaaaaatccatagagccttccgtaagcgcatcaattacttgttgattataattaatagtataacctttttgaataacatcattatgatcagttaaattatgatgcaaaacagggacaagtttagcgccgtttttctttgcaagcgcactgctttcttttatccaatctaatgttccggctgttagtccgccttccgttgtgggatttccttgctgcatatgtgccgtatgaatggcggggtgtaacattgacagcgctgctttggaagaaggagctgctggatgactgaggggaaactgatgactggaatgggctcggtgtgtgcaaatgacatgaaaaaactgat

SEQ ID NO: 2041 - DNA, 6625 bp, Listeria monocytogenes-4B
ctttcttctctagttttgagagagcaatctttcaacaacttaaatattgtctggtagttatggcgagaaggtcacacccgttcccatcccgaacacggtagttaagcttctctgcgccaatggtagttgggggcttccccctgcgagagtaggtcgctgccgggcagtatttctggaggtttagctcagctgggagagcatctgccttacaagcagagggtcagcggttcgatcccgttaacctccattttttatgccggcttagctcagttggtagagcaactgatttgtaatcagtaggtcgcgagttcgactcttgcagccggcaccattaatattaactttatgataatacatatttttattgtagagagccgttagctcagttggtagagcatctgacttttaatcagagggtcgctggttcgaacccagcacggctcacttttgcgggtgtggcggaattggcagacgcaccagatttaggatctggcgccgcgaggcgtgggggttcaagtcccttcacccgcacttattatggaatatgcggaagtagttcagtggtagaacatcaccttgccaaggtgggggtcgcgggttcgaaccccgtcttccgctccatattttatagcaacgccggggtggcggaactggcagacgcacaggacttaaaatcctgcggatagtgatatccgtaccggttcgattccggtcctcggcacttttatttgcgcccatagctcaactggatagagtacttgactacgaatcaagcggttagaggttcgactcctcttgggcgcactttattaaacgggaagtagctcagcttggtagagcacttggtttgggaccaaggggtcgcaggttcgaatcctgtcttcccgatagtttaatcccttattattatggggccttagctcagctgggagagcgcctgctttgcacgcaggaggtcagcggttcgatcccgctaggctccaccaaattatttctaaaattgttgttgccttgcttatagaattgagtaagatataagagttgctgctaaaggcaacgaagaagaaaaagtgacctttgaaaactgaacaaagaagaagacgaaaagcaatgagacgtaaagtctcactggtaatcgcagggcagaaaacagaaagctgttttcaacaaaacaaactagtaatttaattgctagcgaagtcaatttgacgcaaggaatcttattcacggtgttgaataagtattcaaattcaatttatattttaaagagagtttgatcctggctcaggacgaacgctggcggcgtgcctaatacatgcaagtcgaacgaacggaggaagagcttgctcttccaaagttagtggcggacgggtgagtaacacgtgggcaacctgcctgtaagttggggataactccgggaaaccggggctaataccgaatgataaagtgtggcgcatgccacgcttttgaaagatggtttcggctatcgcttacagatgggcccgcggtgcattagctagttggtagggtaatggcctaccaaggcaacgatgcatagccgacctgagagggtgatcggccacactgggactgagacacggcccagactcctacgggaggcagcagtagggaatcttccgcaatggacgaaagtctgacggagcaacgccgcgtgtatgaagaaggttttcggatcgtaaagtactgttgttagagaagaacaaggataagagtaactgcttgtcccttgacggtatctaaccagaaagccacggctaactacgtgccagcagccgcggtaatacgtaggtggcaagcgttgtccggatttattgggcgtaaagcgcgcgcaggcggtcttttaagtctgatgtgaaagcccccggcttaaccggggagggtcattggaaactggaagactggagtgcagaagaggagagtggaattccacgtgtagcggtgaaatgcgtagatatgtggaggaacaccagtggcgaaggcgactctctggtctgtaactgacgctgaggcgcgaaagcgtggggagcaaacaggattagataccctggtagtccacgccgtaaacgatgagtgctaagtgttagggggtttccgccccttagtgctgcagctaacgcattaagcactccgcctggggagtacgaccgcaaggttgaaactcaaaggaattgacgggggcccgcacaagcggtggagcatgtggtttaattcgaagcaacgcgaagaaccttaccaggtcttgacatcctttgaccactctggagacagagctttcccttcggggacaaagtgacaggtggtgcatggttgtcgtcagctcgtgtcgtgagatgttgggttaagtcccgcaacgagcgcaacccttgattttagttgccagcatttagttgggcactctaaagtgactgccggtgcaagccggaggaaggtggggatgacgtcaaatcatcatgccccttatgacctgggctacacacgtgctacaatggatagtacaaagggtcgcgaagccgcgaggtggagctaatcccataaaactattctcagttcggattgtaggctgcaactcgcctacatgaagccggaatcgctagtaatcgtggatcagcatgccacggtgaatacgttcccgggccttgtacacaccgcccgtcacaccacgagagtttgtaacacccgaagtcggtagggtaacctttatggagccagccgccgaaggtgggacagataattggggtgaagtcgtaacaaggtagccgtatcggaaggtgcggctggatcacctcctttctaaggaaaaggaaacctgtgagttttcgttcttctctatttgttcagttttgagaggttagtacttctcagtatgtttgttctttgaaaactagataagaaagttagtaaagttagcatagataatttattatttatgacacaagtaaccgagaatcatctgaaagtgaatctttcatctgattggaagtatcatcgctgatacggaaaatcagaaaaacaacctttacttcgtagaagtaaattggttaagttagaaagggcgcacggtggatgccttggcactaggagccgaagaaggacgggactaacaccgatatgctttggggagctgtacgtaagcgttgatccagagatttccgaatgggggaacccactatctttagtcggatagtatccttacgtgaatacatagcgtgaggaaggcagacccagggaactgaaacatctaagtacctggaggaagagaaagaaaaatcgatttcctgagtagcggcgagcgaaacggaaagagcccaaaccaagaagcttgcttcttggggttgtaggacactctatacggagttacaaaagaaagttataaatgaagcggtctggaaaggcccgccaaagacggtaacagcccggtagttgaaatggctttccctccagagtggatcctgagtacggcggaacacgtgaaattccgtcggaatccgggaggaccatctcccaaggctaaatactccctagtgaccgatagtgaaccagtaccgtgagggaaaggtgaaaagcaccccggaaggggagtgaaacagttcctgaaaccgtgtgcctacaagtagttagagcccgttaatgggtgatagcgtgccttttgtagaatgaaccggcgagttacgatttgttgcaaggttaagcggaaaaagcggagccgtagcgaaagcgagtctgaatagggcgcataagtaacaggtcgtagacccgaaaccaggtgatctacccatgtccaggatgaaggtaaggtaatacttactggaggtccgaacccacgcacgttgaaaagtgcggggatgaggtgtgggtagcggagaaattccaatcgaacttggagatagctggttctctccgaaatagctttagggctagcctcgaggtaaagagtcatggaggtagagcactgtttggactaggggcccttctcgggttaccgaattcagataaactccgaatgccatgtacttatactcgggagtcagactgcgagtgataagatccgtagtcgaaagggaaacagcccagaccaccagttaaggtccccaaatatatgttaagtggaaaaggatgtggggttgcttagacaaccaggatgttggcttagaagcagccaccattgaaagagtgcgtaatagctcactggtcgagtgaccccgcgccgaaaatgtaccggggctaaacatattaccgaaactgtggatgaacctctttagaggttcgtggtaggagagcgttctaagggcggtgaagtcagaccggaaggactggtggagcgcttagaagtgagaatgccggtatgagtagcgaaagaagggtgagaatcccttccaccgaatatctaaggtttcctgaggaaggctcgtccgctcagggttagtcgggacctaagccgaggccgataggcgtaggcgatggacaacaggtagagattcctgtaccagtgctaattgtttaaccgatggggtgacacagaaggatagggaatcgcacgaatggaaatgtgcgtccaagcagtgagtgtgagaagtaggcaaatccgcttctcgcgaagcatgagctgtgatggggaaggaaattaagtacggaagttcctgatttcacgctgtcaagaaaagcctctaggaagagtagtactgcccgtaccgcaaaccgacacaggtagatgaggagagaatcctaaggtgagcgagagaactctcgttaaggaactcggcaaaatgaccccgtaacttcgggagaaggggtgctctattagggtgcaagcccgagagagccgcagtgaataggcccaggcgactgtttagcaaaaacacaggtctctgcaaaaccgtaaggtgacgtataggggctgacgcctgcccggtgctggaaggttaagaggagtgcttagcttcggcgaaggtacgaattgaagccccagtaaacggcggccgtaactataacggtcctaaggtagcgaaattccttgtcgggtaagttccgacccgcacgaaaggcgcaacgatctgggcactgtctcaacgagagactcggtgaaattatagtacctgtgaagatgcaggttacccgcgacaggacggaaagaccccgtggagctttactgcaacctgatatggaatgtttgtaccgcttgtacaggataggtaggagccgaagagacgtgtgcgctagcatacgaggaggcaatggtgggatactaccctggctgtatgaccattctaacccgccacgcttagcgcgtggggagacagtgtcaggtgggcagtttgactggggcggtcgcctcctaaagagtaacggaggcgcccaaaggttccctcagaatggatggaaatcattcgcagagtgtaaaggcacaagggagcttgactgcgagactgacaagtcgagcagggacgaaagtcgggcttagtgatccggtggttccgcatggaagggccatcgctcaacggataaaagctaccccggggataacaggcttatctcccccaagagtccacatcgacggggaggtttggcacctcgatgtcggctcgtcgcatcctggggctgtagtcggtcccaagggttgggctgttcgcccattaaagcggcacgcgagctgggttcagaacgtcgtgagacagttcggtccctatccgtcgcgggcgcaggaaatttgagaggagctgtccttagtacgagaggaccgggatggacacaccgctggtgtaccagttgttccgccaggagcatcgctgggtagctatgtgtggcagggataaacgctgaaagcatctaagcgtgaagcccccctcaagatgagatttcccatttcttcggaaagtaagatccctgaaagatgatcaggtagataggtttggagtggaagtgtagcgatacatggagcggacaaatactaatcgatcgaggacttaaccaaaaaatgaaacgaagttacctaactgaaccctttcttctctagttttgagagagcaatctttcaacaacttaaatattgtctggtagttatggcgagaaggtcacacccgttcccatcccgaacacggtagttaagcttctctgcgccaatggtagttgggggcttccccctgcgagagtaggtcgctgccgggcaatttgaaaagtcctaattatttagggctttttttgttgaagtgtttcttttgtcagctatcttaatggatgttatattagtaaaagactcagtggaatgtagtttttaggtggaggggttattttagtggataacggtatatttatagtggctactatttttattgtaaatattttgtatgtgacgatttatacggtgaggttacttttaacgatgaaaggttatcgttacttagctgcactttcaagtgtgtttgaaatgattatctatgtagttgctcttagtttggttttggataacttaaataatattgccaatgttttagcatatgctattggatttggtgtaggaattattgttggtatgaaaattgaagagcgaattgctttaggctatattacagtgaatgttattaccaaagaatataacttagacttacca

SEQ ID NO: 2042 - DNA, 888 bp, Listeria innocua
atggaacttagacaattaaagtatttcatggaagtagcccgcgtcgagcatatgactaaagctagcgagaatttgcacgtagcccaatctgccgttagtagacagataacgaaactagaggaagaactaggtgtgcctttatttgaccgtgtcggtcgtaatatgcagctcacgagtgtcggtcaagacttcctgagtcaagctacaatcgcattaaatgaactacaaaaagccgaagccctcgtaactgaatacaccgatcccactaaaggaacagttagagtcggcctgcccaattcgctatctaccaaagtcttgccatctgttatttccactttccgagaaaaatatccagaaatcacctaccaatttatggaaggaacaaatgaagaacttaccgaaatgctagtaaatggtgttttagacatgacgttcttatctccagtacccgaatctagtgaacaaattgaagccctccgtttttttgatgaaaaattgaaattaatcgtcccaacaagtcatcatcttgcagaaaatttcactgtttcactcaaggaactctcttctgaaaaattcgtactttatcctgaagacttcgatttatataaaatcgttacgaaagcggcgaataaaaaaggcttcgaaccgcaaatagcttttcaaagcagggatttttatacaattcaaggattggttggcgctggtcttggcattagtattttaccggaaatgattttagatggtgcgatttttaaagaaacgaagagtattgcactccgagataaagagttacgtcgatctgtagggattattacgacaaaaaaacggaacctatccccttctgagaatttgttccgttcatttattatttcgttcttttccaattaa

SEQ ID NO: 2043 - DNA, 6042 bp, Listeria innocua
ttgatcagaaaaatctttatcgggattttgtcatttactatcttaatccaaactgtgattgtttcaaactttaatgttgtttatgcaactactgaagagcaacaacaaaaagttattaagttagaaaaaaaatcaactaataataatataattttaataaaagatgctgttaaagataaagaatataaattatctttaccaaaatcttttagtttagatgagaaaaagacaggcaaagaagttgaatataacaaagaaaaaaatgaactaacaattataggaacaggggaagaaataacgctatatttacttgcttctcaaacaggaaaatacgaacttgaactaaaagaaggggacaaagtacaagccaagttagatttaattgtaaaaaatgtagatgaagaagtcgcaaaaacagtcgaaaaatcaaatagacagttactgcgttcatccatttcggataaactatttcttcaagctgattcaagtaaagccacattagctaattatacagaacaaataacttttaactattctattaattttctagatggttctacgacattgaaaaacggtaaattagtaatagattttaataactctaatcttgaactagtgaattatcctaaagatacagcagcaaataggaatataaaatcaacatcttatagtgcgattacaggtaaattaaccattaacttagtggataatatatctagtggtgctccatttgatattccaatcgttgtaagagctggttatggtgcaaagccaggagtaccaatgaatctaaaagctacactgtcaggagagaacagtgctggtgccacatatacaccagcagaaaaaacaaccaccgttaatttagaagaaaatagcagcaatctagactatagcccaattacagcaggtgataatagctgggcttttagtatgaaagaactcgcattttcacttaagccaggtggatataccatccaatggcctgaaatccagaagaaaagttcggaaaataaaagtttcaaaaatttaaaattagaatttcttaaagaaaatggtggggatattatatctgttaatacggcagatccttacgtaattagattcggagagccttattggtcacagcttagcacagttaatggtaaagcaaatgtacttgttaatgatgatgagaaacaagtagtcgaatatggacccattaacgctaatatttaccaaagaatacaggtatcaatggcagcgaaaataccagcagatgcggttaaaggaacagagtatactggtacggtaaatgtatatgatgaagatattttggtaacttccattaaaattaagaccgaagtgactgactcagcgacttcaatagctgttgatagcaaagtttctaaaacaagcatatcagaaggcgatgtactggaatggggattcatgcctagaatatcttctgcggcaccaggtgttaatgatttagaaattgtagcaccaattcctaaaggtattaaagtactatcttacatcccgaacaataactcaatggcaagtatgaaaaaattagagtactatcagaatggtaaatgggtatcaatggctccacaaacttctagtggttgggatttttcaaagattgaccagtctgttaatcgtattgaaaagctaaaacttacttctagagacggaattattaatgataaagatatgccgccgtatactcatggaacaatacgaatgcaaaatactggtgtgaaagcaggagaatcctttacactccaaccagaatctatcacttatacagactctgataaaaccagtaaagcaattgatacaactgcaagtagctatgaaaagaaagttcaagtagtagaaaaaacttctactccagcgaaaataaatggcgatgttttcttatcttcaactgctggtatttatggcaaaggatttgaaagtacaattttttttaatggcgacaaaattgcacagtcagttcgtttaggctcatacggaagtaaactagaaaatccatatatttttgtggtagtaccaaagggtatcgatgtagaaactatgaaaaatttcattcaacaaccgtatagaagtatattaaattatacgtatgctcctgctaatggaacgaatactctttaccctaaatccagtgcagatgttaagggaaaagaaactttatcagatggttccacattatattactgggaagcgccggatactggtttagcaccaggcatggaaaattgcgaaatgctagccttagatttagtttttaaattaaataaagcaaacagtggcgcaaataaagtagaatttggtatgggatcaatgacagattctagttggaatttatatggtgctgctaattcaggatatgaaacaaaagaattatctgccgaattacaatccaaacttcccggagtaacatctactaaatacttgtctaaatcgaagacggcaaatgtaggtgcatctaatagtattgcaactaaaatgaaaattaaaggaagtcaagataacgactttgttgatgttagtgcaaatacagctactacaattccaggtaaaagagtagattataatttaacatttgaaaataatggtacaagaagtatgaagaacttagaaattatcgatatacttccgcacaaggatgatcagtatgttttaggcactggtccacgcggatcgaaattttcagttatcccaactagtgaaatcgaagttcttgttaatgggaagaaaagtgattcagcaactttagaatattcaacaagtaatacacctgaacgtttcgatgcaaacggggaggatgtagcaggtgacccttggcaaatcgtggcaccaacaagtatggcagatgtaaaaagtttccgtattaagctaccaaatacagaattcaaagtaggagacgaaatcagcctaaactttgaagcaatagtgccaacagatgctccaagaaatggtgaaatagcatataactcgattgcttaccggattgataaggaaacaagctctggtacaagcaaattagcatcagaacctcctcgtgggggagtaaaaagtacaaatccatcaacagatttaaacatagccggtaactctttctccgatcttaacaaaaatggtgtaaaagatgcggacgaactaggtttaaacgctgttaaattagatttatacaaaaaaaataacaatgaatttgagaaagtggaaaccgtttatacttcctcggatgctctagataaagaaaaaggtttatttgattttaatggcttgagtaatggaacatataaaatagctgctcatctaccgaataaaaatgcagactttattactaccggtccaaataaaatcgtaaaagactcaaaagatgattcgattggctggataacagtcaataactctacagaattcacaattgatgatttggctaacggaaatcctaaaagtctagttggtattcatgtacctatttatatggcaacacctataaaaggcactgttgttttcgtaaataaagacggagaaccaaaaatcacatcttacggtcaagattatgaaatagctttatttgataaagatggaaaagaagtacaatcagcaattaaaacgaataataagggagaattttcttttagtgatgtagctattaaaaacccagctgattttaaattaaaagtaactgcaccaactagaacaaattttgtctactcagcaaaaaatcctttatttaatatgtctacaaaggaatatactttaaatagtgtagttccaggcgtgggtggggtagcagaaatttatattactgaaactagtaaaccaactacaaagattatactagataaagcagttactccaaatgcaattacaattgaatcaagtgatgaagctacagaagtaacaaatgaatggacagtagtagatagtaatggaacagtcgtttattctggaaccggaaatacgattcgtattccaaacgatgaaggaacgtatatagctaaaaacacagcaacagatgaggctggaaataccgcttctgatgaaaaaacgtttgatatagattatacagttccgacattaacagttaatcaagatgcatcagcagaagtgaatagtactgaggcaaatattgattggattaagccgttaaatgtagcagcaacagatacgcatgatggaaatatcacgccagtagtagattatagtaaagttaaatgggatgtacttggaacatacccagttactgttacagcaacagatgcaagtggcaacaaagctactcaaacagtaaatttacgcatagtagatactacttcgcctacaattttaataacgaataatccattaacgtattctatcgaaaacatgcgaaaattaactgaacaagaattgtataaagcggcaggacttatcggtggagataattatgatttagcaccaggtcaatcagtccaaccaaataaacagccaatggtatttactagcaactttagtactatttttagtgacatcgctagtgtgaaacctggacaatatcaagttcaagtgaatttagcagattctagtggaaatcaagctattccacaaacaattactattaatgtagtagataccatgggaccagtgattaaagcagataatgtgtcttaccacgttaatacaacaaaaacagaagcagaattcttccaagatgctcgtttagatgtgacagataacaatgatgatacaactaatttaattattacttctaattttgcagaaaaagtgaatttgaataagcctggtaagtatgaagtaaccatcagtgctacagatactaaaggcaatcaaacaacaaaagaaataacagttcaagtaagcaaggataaaccagtcattactgcaggtccaaaaataagctaccaaggaaaaaccgaagtaacagaagctacctttttaagcgatatccacggggaagtaacggatgaattagatggtgatgttaaaattactagtgattttgctaaaaaagtagattttaataaagtaggaacatatacggttactttaaatgcgaaagatgaatatggtaatactgcagaacctgtaaaagtgtcagtacgcatctttaataagatcgcaccaactttcaataatgctgataataaaacaattgaagcagtaaacgagttaccatcattagaatctatatttaacattgaagcaaaagactatctttcaggtaataaattaaaagtaacttatacaccagatcaaacaattaaaggcaatgttttaggtgagtattctattaaagtcacaacgaaagatgattcaggcaacacagctgaaacaactgttactttaacaattaaagatacaacaggaccaagcataaaaatgactaaatcaacaaacaaattagaagtacaaagcaaagaaccgaattggataactttctttggagtaaaagcgactgatattgttgatggtgatgtaacaaaaaatattaaagtagacagtagtgaagtcaatcttaataaagtaggaacttatcctatctactttacagttacagatgcacttggaaatgaagctagtaaatcaaaaagcacagtgcagattgtagatacaagtagtcctgcgctaacaatcgacaaactagaaattagttatccaacaggaaaaacagtttctgataagcaatttctacaagatattggtactaaagttacaaatagttatggaacagtaaaagtaactactaatctaagtaaaattgttgattgggacaaagctggacagtataaagtaactgtaacagcgacaaattcatctggaggcgttgctgagaaaacgattctattaacggtcaaaaaagctgattcagcgtttatagcaataccaagtaagaatgataataataacaaaccaacaaaaaatatcccaaaaacaggagatactttaaatacagagctaattgtctttggtgttatgtcgctacttgttggaggatggttgttcttaagaagaaaaacaaaagtaaaaacaaagtga

SEQ ID NO: 2044 - DNA, 6042 bp, Listeria monocytogenes-EGD
ttgattagaaaaatctttatagggattttgtcatttactatcttaatacaaactgtaattgtttctaactttaatgttgtttatgcaactaccgaagagcataaacaagaagctattaagttagaaaaaaaatcaactaataataatataatatgtataaaaggtgctgtgaaagataaagaatataaattatctttaccaaaatcttttaatttagatgagaaaaagacaggaaaagaagttgaatataacaaagaaaaaaatgagctaacaattataggaacaggggaagaaataacgctatatttacttgcttctcaaacaggaaaatacgaactagaactaaaagaaggggacaaagtacaagccaagttagatttaattataaaaaatgtagatgaagaagtcgcaaaaactgtcgaaaaatcaaatagacagttactacgttcatctatttcggataaattatttcttcaagcggattcaagtaaagccacattagctaattatacagaacaaataacttttaactattctattaattttctagatggctcaacaaatttgaaaaacggtaaattagtaatagattttaataactctaatcttgaactagtgaattatcctaaagacacggcagcaaataggaatataaaattaacatcttatagtgcgcttacaggtaaattaaccattaacttagtggataatatatctagtggtgctccatttgacattccaatcgttgtaagagctggttatggtgcaaagccaggattaccaatgaacctaaaagctacactatcaggtgagaacagttcaggtggcacgtatacaccatcagaaaaaacaaccacagttaatttagaggaaagtagctccaaccaagactatagtccaattacagcaggtgataatagctgggcttttaatttgaaagaactctcatactcacttaaaccaggtggatatactatccaatggcctgaaatccagaagaaaagtttggaaaataaaagtttcaaaaatttaaaattagaatatcttaaagaaaatggtggggatgttatatctgttaatacagcagacccttacgtaattagattcggagagcctttttggtcacagcttagcacagttaatggtaaagcaaatgtacttgttaatgatgatgagaaacaagtagtcgaatatggaccaattaacgctaatatttaccaaaaaatacaggtatcaatggctgcgaaaataccggcagatggggttgaaggaacagagtatactggtacggtaaatgtatatgatgaagatgttttcatcacctccattaaaattaaggccgaagttgctgattcagctacatcaatagcagttgatagcaaggtttctaaaacaagcatatcagaaggcgatatatttgaatggggattcatgcctagagtatcttctgcggcaccaggtgtaaatgatttagaaattgtagcaccaattcctgaaggtatcaaagcattatcatacatccctaataataactcaatggccagtataaaaaaattagagtactatcagaatggtaaatgggtatcaatggccccacaaacatctagtggttgggatttttcaaagattgaccagtccgttaatcgtattgaaaagctaaaacttacatcaagagacggaattattaatgataaagatatgccgccttatactcatggaacaattcgaatgcaaaatattggtgtgaaagcaggagaaagctttacactccgaccagaatctatcacttatacagacccagacaaaaccagtaaaacaattgatacaacgacaaatagttatggaaagaacgttcaagtagtagaaaaaacctctgctccagcgaaaatcaatggcgaagttttcttatcttcaactgctggtacttctggcaagggatttggaagtacaattttctttaatggcgacaaaattgcacagtcagttcgtttaggctcatacggaagtaaactagaaaatccatatatttttgtagtagtaccaaagggtatagatctagaaactatgagaaatttcattcaacaaccttatagaagtacattaaattacacgtatgctcctgctaatggaacgaatactctttaccctaaatctagtgcagatgttaaggggaaagaaactttatcagatggttcaacgttgtattactgggaagcaccggatactggtttagcaccgggcatggaaaattgcgaaatgttagcattagatttagttttgaaattaaataaagcaaacagtggtgctaataaagtagaatttggtatgggttcaatgacagattccagttggaatttaaatggtgctgctaattcaggacttgaaacaaaagaattatctagtgaattacaatccaaacttcccggagtaacatctactaaatacttgtctacaacgagaacagcaaatataggtgtatctaatagtattgcaactaaaatgaaaattaaaggaagtcaagataacgactttgtggatgttagtgcgaatacaggcactacaattccaggtaaaagagtagattataatttaacatttgaaaataatggtacaagaagtatgaagaacttagaaattattgatatacttccgcacaaggatgatcagtatgttctaggcactggtccacgcggatcgaaattttcagttatcccaactagtgaaatcgaagttcttgttaatggaaagaaaagtgattcagcaactttagaatattcaactagttatacgccggaacgtttcgatacaaacggggaggacgtagcaggtgattcttggcaaatcgtggctccaacaaatatggcagatgtgaaaagtttccgtattaagctaccaaatacagaattcaaagtaggagacgaaatcacactaaactttgaagcaatagttccaacagatgctccgagaaatgatgaaatagcgtataattcgattgcttaccggattgataaagaaacaggctctggtacaagcaaattagcatcagaacctcctcgtgggggagtaaaaagtacaaatccatcaacagatttaaacatagccggtaactctttctccgatcttaacaaaaatggtgtaaaagatgcggacgaactaggtttaaacgctgttaaattagatttatacaaaaaaaataacaatgaatttgagaaagtggaaaccgtttatacttcctcggatgctctagataaagaaaaaggtttatttgattttaatggcttgaataatggaacatataaaatagctgctcatctaccaaataaaaatgcagactttattactaccggtccaaataaaatcgtaaaagactcaaaagatgattcgattggctggataacagtcaataactctacagaattcacaattgatgatttggctaacggaaatcctaaaaatctagttgggattcaaattcctatttatatggcaacacctataaaaggcgctgttgtttttgtaaataaagacggagaaccaaaaatcacatcttatggtcaagattatgaaatagctttatttgataaagatggaaaagaagtacaatcagcaattaaaacgaatagtaagggagaattttcttttaatgatgtagccattaaaaatccagctgattttaaattaaaagtaactgcaccaactggaacgaattttgtctattcagcaaagaatcctttatttaacatgtctacaaaggaatatactttaaatagtgtagttccaggcgtgggtggggtagcagaaatttatattactgaaactagtaaaccaactacaaagattatactagataaggcagttactccaaatgcaattacaattgaatcaagtgatgaagctacagaagtaacaaatgaatggacattagaagatagtgatggaacagtcgtttatactggaactggaaatacgattcgtattccaaacgatgaaggaacatatatcgctaaaaacacagcaacagatgaggctggaaacaccgcttctgatgaaaaaacgtttgatatagattatacagttccgacattaacagttaatcaagatgcatcagcagaagtgaatagtacggaagcaaatattggttggattaagccgctaaatgtagcagcaacagatacgcatgatggaaatatcacgccagtagtagattatagtaaagttaaatgggatgtacttggaacatacccagttactgttacagcaacagatgcaagtggcaataaagctactcaaacagtaaatttacgcatagtagatactacttcacctacaattttaataacgaataatccattaacgtattctatcgaaaacatgcggaaattaacggaacaagaattgtacacagcggcaggacttatcggtggagataattatgatttagcaccaggtcaagcagtccaaccaaataaacagccaatggtatttactagcaactttagtactatttttggtgatatagctagtgtgaaagctgggcaatatcaagttcaagtgaatttagcagattctagtggaaatcaagctattccacaaacaattactattaatgtagtagatactgtgggaccagtaattaaagcagataatgtatcttatcacgttaatacaacaaaaacagaagcagaattcttccaagatgctcgtttagatgtgacagataacaatgatgatacaactgatttaattattacttctaattttgcagaaaaagtaaacttgaataagcctggtaagtatgaagtaaccatcactgctacagatactaaaggcaatcaaacaacaaaagaaataacagttcaagtaagcaaggataaaccagtcattactgcagatcccaaaataagttatcaaggaaaaatcgaagtaacagaagctaactttttaagtggtgtccatgcagaagtaacagatgaattagatggtgatgttaaaattactagcgattttgcagaaaaagtagattttaacaaagtaggaacatatacagttactttaaatgcgaaagatgaatatggtaatactgcagaacctgtaaaagtgtcagtaagcatctttaataagatcgcaccaactttcaataatgctgataataaaacaatcgaagcagtaaatgagttaccatcattagaatctatattcaaaattgaagcaaaagattatctttcaggtaataaattaaaagtaacttatacaccagaacaaacaattaaaggcaatgttccaggtgagtactctattaaagtaacaacgaaagatgattcaggcaacatagctgaaacaactgttactttaacaattaaagatacaacaggaccaagcataaaaatgactaaatcaacaaaaaaattagaagtacaaagcaaagaaccaaattggataactttctttggaataaaagcgactgatattgttgatggtgatgttacaaaaaatattaaagtagacagtagtgaagtcaatcttaataaagtaggaacttatcctatctactttacagttacagatgcacttggaaatgaatctagtaaattaaagagcacagtgcagattgtagatacaagtagtcctgagctaacaatcgacaaactagaaattagttatccaacaggaaaaacaatttctgataaacaatttttacaagatattggtactaaagttacaaatagttatggaacagtaaaagtaactactaatctaagtaaaattgttgattggaacaaagctgggaagtataaagtaactgtaacagcgacaaattcatctggaggcgttgctgagaaaacgattctattaacagtcaaaaatagtgattcatcgtttatagcagtaccaagtaaggatgataataagaacaaaccagcaaaaaatatcccaaaaacaggagatactttaaatacagagctaattgtcatgggtatgatgttgctacttgttggaggatggatgttcttaagaagaaaaacgaaagtaaaaacaaagtaa

SEQ ID NO: 2045 - DNA, 2823 bp, Listeria monocytogenes-EGD
atgtataaacttgtcaaaataattttagctttattcttaataactacagtattcttaccatttagtaatgtaaaggcagcaccaacagatgtagtaaatatacctgatccggtgttaaattcaggactaaaaaacatcataggaaatcctttcttagatgagataaccgaggcaaatatggcgactattactgtcgcagatctttccaatatgtcaggagcaccggggtatccagttaccggcctaattaaagatttaacaggactagataaagccgttaatatgaccaaattatatttttccaatcaatcacaaattaaaaatctagataaaattaaaaatttacccaatttgaaaaaaatcgtagcagtaacaacgggattgaataatatttcagctcttggagaaatgccggcgttagaagaagtagaactcggcggtgattatattaccgattttacaccattacttgaaaaggaaaatttaacatcattctcttacaactcttacgcatggtccaatcctgcataccatcaaattaataatgatgaatttaaaaattttacaaaacttaaatcgttagtaaaactagatttaacttggaataatattaccgatttatcacctttaacagaaaatgatcatattactaacttaaatttaaattataaccagtttactaatgtcgcccctattgctaccatgaaaaatttaaaagtactttatttgaacaacaataatttaacttccatcgatgcattgaacacactaagaggcttaacaattgcttatgcagataacaataatattaccgacttgagtaacttgaaaaacttctttgaagcaatggttgcccaaggagattatgaaggactgcaaattaataaccaaactatcacacttccgacaataaatataaaaaaaggagcaacagcaaattcaactaaccccactttagatattaatggtcaaaaaatgcctgtttccaatatttctaatgatggaacagtctctgctgataacaaaaccgtttcttttgcaaatctacctataggaaataagactgtcacttacaaagccaaatttacagcaacttcttctaaaggtgtccctctcagctattctatcaatgtgtcacaaccaataaatgtttctgaacaaacagattcaacagtgagtgtattttaccaagatgaaaacggcaatgaattagctcccaccgaaacactctcaggcaaatctggggaggattatcaaactaccgaaaaaacaatagccaactatcagttaaaagaaattgaaggacaagcttctggtcaattcaccgacaccgattcaactgttacctatgtttatgaaaaagcagatggcgctcccgttactgtgaaatacgtcgacgcggacggcaacgatttagctacttccgacacactgaacggcaaaattgatgcaccttatcaaacttccgccaaaagtctttccggttggacagttaaaactacacctaataacgcaactggcgtatttaccaatagtaaacaaaccgttacgtacgtttacgaaaaagcagatggcgctcccgttactgtgaaatacgtcgatggagatggcaacgaattagctacttccgacacgcttaacggcaaaattgatgcaccttatcaaactacagccaaaagtctttccggttggacagttaaaactacacctaataacgcaactggcgtatttaccaatagtaaacaaaccgttacgtacgtttacgaaaaagcagatggcgcgcctgttaccgtgaaatacgtcgacgcggacggcaacgaattagctacttccgacacgcttaacggcaaaattgatgcaccttatcaaactacagccaaaagtctttccggttggacagttaaaactacacctaataacgcaactggcgtatttaccaatagtaaacaaaccgttacgtacgtttacgaaaaagcagatggtgctcccgttactgtgaaatacgtcgacgcggacggcaacgaattagctacttccgacacactgaacggcaaaatcgacgcaccttatcaaactacagccgaaagtctttccggttggacagttaaaactacacctaataacgcaactggcgtatttaccaatagtaaacaaaccgttacgtacgtttacgaaaaagcagatggcgctcccgttactgtgaaatacgtcgatggagatggcaacgaattagctacttccgacacactgaacggcaaaatcgacgcaccttatcaaactacagccaaaagtctttccggttggacagttaaaactacacctaataacgcaactggcgtatttaccaatagtaaacaaaccgttacgtacgtttacgaaaaagcagatggcgcgcctgttactgtgaaatacgtcgacgcggacggcaacgaattagctactccagatacattgaacggtaagctagatacatcttacgcggtaacagctaaaaacttgagtggttggaagttaacagctactccatccaacgctaatggcgtatttacaactgatgctcaaacagtaacctttgtatacgctaaacaagaagacgatcctaaaaaagatgataaaacaccaaataatacaaaaccagatacaaacaaaacacctattaaaatcaatgaaaacaaaccaacagcaagcaaagtaactacaatcaaaagacaaacaaaattaccgaaaaccggcgatactcaacaagatagtatattgttcggattagttggtacatgtttcgttctcttaggaatttactctatctctaagaaaaacagctaa

SEQ ID NO: 2046 - DNA, 729 bp, Listeria monocytogenes-EGD
atgacaaagatatggattgacgctggacacggtggtaaggattcaggtgcgagtggtaatggacttgttgaaaaaaattgggtactaactgtagcaaaacaacttcaaacagagttagttaaagccggttttgaagtgggaatgacaagaacaaatgatacattctatgaattaagtgatcgtgcgaagaaggcgaatagttttaaagctgatttatttatttcgcttcattttaatgctggtggcggtaaaggatatgaagattatatttacacatccgtcccggctgcaacggtagaaatacagaaaataattcataaaaatattattactaaagttactaaacacggaatgaatgatcgtggaatgaagaaagctaatttcgctgtattaagagaaacagcaatggatgctatcttacttgaagctggattttgcgatagcactgatgcattaattcttgagaagaaagcttatcaaactgattattgtttaggaattgtatcagcagtacaagagatttttggggctatggtaacaaaatatagggcaggcaaatatttgacaagtgacgatgctatatcaggcacaaatattaaaggatatttagaagcaggaacaaaggtttttgtttataaagaaacagaaaaaacgcttaatttaactactacaaagggtgttccaggaagctgggttttaaaaacagaagttaatacaggaaaaagataa

SEQ ID NO: 2047 - DNA, 1362 bp, Listeria innocua
ttgggacgaaaagggaggaaacaactaatggctgaaacgaaaaagaagtcgattgttaatggttttattaatgtagcacaacgtcttggtggtcagattcatttgcgttcattgcgtgatgcttttgcgagtattatgccgttcatgattttagctggttttgtcacgctgattaactatgttattttagaaccgactggctttatgggcaaaattgttaacccagatacacttaaaacatggcaagagattggtatttcaatcggaaatggtaccttgagtgtcattacgcttttagtcactgtggcgatttcatatcatttatgtttgaatcgtggctataaaaacgtcattgctccaattcttgttgccttatcttcatttatcgtcgtaacaccgattgcgatgacgttccttccagaaggcgcatcaaaatcaatcgaagtaccaaacgttattccagttagttatactggtgcgtcaggcatgttcgtcggtattatcgttggcttaattgcaaccgatttattcattaaattatcgaaaaacaaacgtatgcaaatcaatttaacaggaaatattccaccagcagttattaaatcatttaacgtgttaattccaattatgattacggttattattttctcagttgtgtcatttgcagttaatcaaattttcagcatggactttaacacgcttgttacaacgattatcacgaggccacttagctatgtgacgacaagtcttccagggttcttgctgattacttctatcgctaacttattcttcggtttgggtattcatcaagcagttatttctggtccgttactagatccatttttacttcaaaatatgcaagaaaacatggttgcctacgcgaatcatcaagaaattccgcatattattaacatggctttcaaagacacttttgcggttatgggtggctcaggaaacacgattggcttattaattgccattttcatctttggaaaacgaaaagactataaagatatttccaaactatcagcagcaccatcgctatttaacatcagtgagccaatcatctttggtctaccgattgtgttcaacccgttacttattatcccgttcgtattagcgccgattttctctttaacaactgcgtattttgcgacggcagcaggttggattaatcatgtagtagtacaaaccccgtggacgacaccgccgattatttcaggtttcttagcaactggtggggactggcgcgcgtccgttctacaagtaattatcattgttataacagtctttatctatctaccattcctacgtatggatgaaaaagttgcttttgctacagctcaaaaaacagaagcaaaataa

SEQ ID NO: 2048 - DNA, 1764 bp, Listeria innocua
atgcgaagaatgggaatcaaaattggcttatgcgctcttttagtatctccatttattataccgttttcagctaatgtttcagcagaagaaaacattggtatcaaggctgcgcaagatattgtcaacattcccgacccagtgttaaaaagctatttaaatgggctgttaggtcaaccaagtacaagtgacattaccgaagcgcaaatggacacaatcacaaacgtcactattagtaataatagcctaactgatttaactggacttgattacgcgcataatttaacgcttttacatttatcaaatacgggggtaacagactacgctttagttgcaaaaatacctagtctaactaatcttagtattgatgggaataacttaacaactgattcattaccagatttaaatggtttaacgaacatcaccaacttaaatctaagccctggtaagctcgacaatagcgcattaactaaatttaataaaatgccgaacttaacttatttaaatttagatagtaatccttctattactgacatcatgccactaaaatccataccaaatttagctaccttatttgtccaattttgtggaattaatgattttcgcgggattgactcattccctaaattacttaacttatctgcttacggacaaaatgttggtagaaccgttttaatcaatagcacaattaaaagctcctcattaaactttgatgaagctaaccaaacgctttttgtaccatttactttaatgacacagcggagcgtaaatttcgatggctatatgttcccttttacaactaacgctggatctgctggcacttattttactttaaataatactaaaattgatggcagccgattaagcattgacgataaaggaattacagtgagcggcattacaaaagattactttgatactattacaaaaatggaatataatgcgctttacaataatcccgccggatcttatcaaacaccaccaggcttcaatagttattcagtatcaggtgggtcgtatgatcactactttgacatcgatcacacattaaatatcactagcgattctacaataagttacacggagcaaacaactgttacagaagaacaatttttaacagatattcacgctgaaacagatgatggcacacctgttactagtgattttgatagcgttgtagatcttaataaaccaggcgtttacacagtaacattaaatgccgaaaacgctggtttaaaagcagctccaaaacaagttactgttactattcttgaaaaaccagtaattacagcaaataatagcatcacttacacgaaagatactactaaaactgcccaacaattcctaaaagatatttcagctaaaacaagtgatggcagtgcagtcacaagtaactttgatagtgaagtagatttaacccaagtcggaacttatgaagtaacattaaatgcagtaagttcaaatggcgttgaagcggatcctattaccgtcctagtaaatgttgttttaggaaacgaaccaccaacaccgccgggaccaggaccagatcctaatcctgacccgaatactccagctataaatgatgataataatgatgatcctgtgctatccgaagattctaatgatacgccaaacaaccagaataaatcttctgaaaaaccagcccttccaaacactggtgactcaagtcaaacaacgattgtcttaatcggtattattttaacaggcatcggagtaatctttttccgcaaaagaaaacatagttaa

SEQ ID NO: 2049 - DNA, 1869 bp, Listeria monocytogenes-EGD
ttgaaaaggactactcgctacagtagaaaatatgttccgagtattgatggacttcgagcactcgcagttattgctgtaatcgcctaccacttgaattttagctgggctaaaggtggattcattggcgtagacatatttttcgtcttatctggttatttaattacaaatattttattaacacaatgggaaaaaaaccaatcacttcaattaaaacaattttggattagacgttttcgacgactcattcctgcagtttatgtaatgattgtggtggttgtcatctattccgtcttcttccatccagaaatcttaaaaaacttacgtggcgatgcgattgcttctttcttttatgtaagtaactggtggtttattttccacaatgtttcttattttgattcttttggacttccatcaccacttaaaaacttatggtcactagccattgaagaacaattttatttaatctggcccgcttttttactggtgtttctcaaatgggtcaaaaatccgaaactattattaaaaatcgtcattggccttggtcttctttccgcagtttggatgacgattttgtacgttcctggaacagatccaagtcgtgtttattacggcacggatacgagagcatttgatttgctatcaggttgtgcacttgcatttgtttggcctttcaatcgccttagtcctgtggttccaaggaaaagtaaggcagttctcaatattgcgggaacaatcagtattttatgttttattctattcacagcttttgtaagtgaatatcaacctttcttataccgtggtggcttgttattcgttgcaattctaggcgttattatgattgcaactatctcgcaccccgcttcttatctaagcaagattttcagttttaaaccacttagatggattggaacaagatcttatggtatttatttatggcactatccaattataacattgactacaccagtactagaaattactcagcctaatatatggcgagctatcctacaagttgcggctacttttattattgctgaattatctttccgctttattgagactccaattcgaaaaaatggttttattaactattttaaaggcttcaaagataaaaactatttcatttggaaaaataaacctgttggtaaatggttaagcattgctggtgttgttgctgttttagcaatctttacgctgggcatgtcaaacgttctttccgtcaacaccaatgcagaaaaacaacaaacgtctgttaaaacaaccacctctaccccagacgagaagaaagatgataaaaaagaagataaagctactaaggataaagaagcagactcaaataaagctagcgaacaaaaagaaacacaaaaaccagacaataaaaataaatcagctgctactccaaaaacaataattacgcaaacggtggcaattggtgattcggtcatgcttgatattgaaccatacttgaaagaggcagttcctaatatcacaattgatggtctagttggacgtcaattacgagatgccattacaactgctaccggctataaaaaattcaatagtgaaaatagctctgtcattctcgaacttggtacaaatggtcccttcacagaagaccagttaaacgatttattagatcaatttgataaagcaacgatttacttagttaacacacgggttcctcgtggttggcaatcggatgtaaataaaagtattgccaatgctgcttcacgacctaatgtaactgttgttgattggtattcaagatccagtggtcaatctcagtactttgctccagatggtgttcatttaactaaagctggcgctcaagcttatgtcgccatgttaactagcgtcatgaacaaataa

SEQ ID NO: 2050 - DNA, 1677 bp, Listeria monocytogenes-EGD
atggtacaattattttcagcgtttgacagagaaacaatcgaaagaaatcttcaagaggaaaaatttgatttagtcatcgtcggtggaggaattacaggagcgggaatcgctttagatgctacttcacgaggcatgagtgtcgcgcttgttgaaatgggtgatttcgcgagcggaacatcgagccgttcaacgaaattagtccacggtggattaagatatttacaacaatttgaaattaaagaagtagcagatttaggaaaagaacgtgcgatagtctacgaaaatggaccacacgtaacgactcctgaatggatgatgctcccgttccataaaggtggcaatatgggcaaaactaccgcttcgtttggtattcgtttatatgactatttagcaggtgtaaagaaaaatgaacgacgtaaaattctaagcgcaaaagaaacactagcaaaaaatcctttcgtgaaaaaagacggcttaaaaggatctggttactacgtagaataccgcactgatgatgcgcgtttaacaatagaagtaatgaaaaaagcggtagaacttggagcgaatgccattaactatacaaaagcagagcatttcttatatgatgacaataaacaagtagttggcgtaaccgtaacagatcgtttgtcgggcaaagcatacgatattaaaggacatcgagttattaatgctgctggtccatgggtagataaagtaagaaaattagattacgcaacaaacaacaaacatttacgcttaacaaaaggaattcatttggttatagataaacaaaaattcccgatggaacaagctgtatactttgatacacctgatggccggatggtttttgctattccacgcgataaaaaagtatatgttggaacgacggatactgtatacgacgaagcagtaatcaatccaaaagctcttgaatctgatcataattatgtgattaaggcgattaactatatgttccctgatgtgcatattaccgaaaaagatattgaatcaagttgggctggggttcgtccacttatctatgaagaaggtaaagatccatctgaaatttcacgtaaagatgaagtttggttttctgaaagcggcttaattacgatggcaggcggtaaactcactggttacagaaaaatggccgaaaaattattagatgacgtttctaaaacattagcgaaagaaactggtaaaaagtataaaacagttcaaacaaaacatttaccaatttctggtggtgacattggtggttcagaacaattagaagctttcctatctaaaaaagcgaaagaaggtaataatcgtttcggctggactttagaagaaggccgtgagatggctaaacgttttggtagtaatatcgatcaattatttacttatgcacaggaacataaagaacaaaacgaaaccactttaccaaacagtttgtacgctgaactacgctactcaattcaacatgaagcagtgacaacaccaatcgatttcttattacgtcgcactggctacttgcttttcgatatgccgtacttacttgaatggaaagacgctgttgtggatgaaatggctaagcaattccactggagcgacgatgtaaaacaaacctatattgaggaattaaatattcaaattaatgatgctagagaaccggctgattggcacgatagataa

SEQ ID NO: 2051 - DNA, 918 bp, Listeria monocytogenes-EGD
ttgagcaagattcctgtcatcgtcatcgtgggcccaaccgctgtcggaaagacaagtttaagcattgaactagcgaaaaaattggacggagaaatcatcagtggtgactctatgcaggtttatcgtggattagatatcggtacagcaaaaatcacaccagaagaaatggatgaaatcaaacattatcttattgatgtgaccgatccttccgaaccattcactgcagcgaaattccaaacagaaacaagaaaatggatagaaacaatacatcaagctggtaaactaccaattattgttggcggaacaggactttatattcaatctgttttctatgattatgattttggtaacgtaagcgaagataaggcttaccgagcggagttagagcaactaaacaaaactttattgtggcaaatgctcgaacaacaagatccagaaagtgcagcccagatacatgaaaacaataagcgccgagtgattagagcattagaagtgatgcatctaacaggaaagcctttctcggagtatcaagtgcataatgtacttaatgatacatataaaccactttttctaggacttgatttggacagagcgttactttacgaaagaataaatcaacgagtgaatttaatgtttgaagaaggtttagtgacagaagcgaaaaaattgtatgaccaacatttagtcgatgttccagctgtttgtggcattggctacaaagaattatttccttattttgaaggaaaaagctcgctagaagaagcaaaagaattaattcaaaaaaattcgcggcatttcgcgaaaagacagttaacgtggtttaggaataggatggagattgattggattcaagcgggtgttagtactaccgaagccgaagcgttgaataaagccgagacctttttatcagttaaataa

SEQ ID NO: 2052 - DNA, 1225 bp, Listeria monocytogenes-EGD
tgtggaacgagaaaaaataatacttgtaggcgtctttttgccaaataaaaccgaagaagctttctggaattccatgaaagaactacacagccttgctaaaacggcgaatgctgaagtgatggatgaattaattcaaaaattagagagagtaaaccaagcgtcattcattggttctggtaagctggatgaactcgctgcgctagtggaaatgcatgaggcggatgtagttatatttaatagtgagcttagtgctacgcaagtgcgcaatatttcggctgctgttgaggcgcggattattgatcgaacacaattaatcttagacatctttgctatgtgtgcaaaatcaagagaaggaaaattgcaagtcgcatatgcgcaatataaatatcttttaccaagacttagtggacaaggtatttctttgtcaaaattaggtggaggtatcggttcgagaggccctggggaatccaaattagaaatggataaacgtcatatccgcgaaaaaatgcatgatatcaaagcacaattaacgcatgttgaacagcaccgtaaacgaatcattgaacgaaggaatacgcaatctgtttttcgttttggtttaattggttatacaaacgcaggaaaatcaactattttcaaccgattaacaaatgaaacaactttacaagaaaataaattatttgcaacattagatccgacaactcggaaagttcgcttttccggcggatttcaaacgcttttgacggatacagttggatttattcaagatttgccaacgacattaattgcggcatttcggtctactttggaggaaacggctaatgtagatgtgttaattcatgtagttgatgcgtccaatccagactatttacaacatgaaacgacagtaatttccttattagaggaacttgaaatgaatcatctgccaactttagtcatttacaataaaatggatcatgcaccagccacgtttgtacctgatcaaccagaaagtctgcttatttcagccttagatcaagaggctccagatacaattaaacagcgaatgatacaattaattgaaaaaaattgggctttctttacgatagaactttcagaagagaaaggaaaagaattagcacaaataaagcaacaagcttgggtaacgaaactagaatatattgaaagtaaacagagttaccacatagagggatacaaaccgagaaaggagctaaataatgaataa

SEQ ID NO: 2053 - DNA, 1902 bp, Listeria innocua
ttgaaaaggactactcgctacagtagaaaatatgttccgagtattgatggacttcgagcactcgctgttatcgctgtaattgcctaccatctgaacttcagttgggctaaaggtggattcatcggcgtcgacatatttttcgtcttatctggttatttaattacgaatattttgttaacacaatgggaaaaaaatcaatcactgcagttaaagcaattttggctcagacgttttcgacgactgattccagctgtctatgtgatgattgtagtagttgtgatttattccgtgtttttccatcctgaaattttaaaaaacttacgtggtgacgctattgcttcattcttttatgtaagtaattggtggtttattttccataatgtatcttatttcgattcatttggacttccatcaccgttaaaaaacttatggtctcttgcaatagaagaacaattttatatggtttggcctttgtttttacttgtattcctcaagtgggttaaaaatcctaaattacttttaaaaatcgttgtaggattaggtcttctttctgcgattttaatgactgtgttatatgtcccgggaactgatccgagtcgagtttattatggaacagatacaagagcatttgatttactagctggttgtgcactcgcttttgtttggcctttcaaccgacttagcccagttgtaccgaagaaaagtaaagctgctcttaatattgctggaacaattagtattcttttcttcctgttatttacagcgtttgttagtgaataccaaccatttttataccgcggtggtttgctgttagttgctattcttggcgttatcatgattgcaactatctcccacccagcctcttatttaagcagaatttttagttttaaaccgcttagatggattgggacacgttcctatggtatttatttatggcactatccaattattactttgactacacctgttttagaaatcacgcagcccaatatttggcgcgctatcttgcaagttgccgcaacatttattatcgctgaattatcgtttcgtttcattgaaacacctattcgcaaaaacggcttcattaattatttcaaaggattcaaagataaaaattattttgtcttgaaaaataaaccggttggcaaatggcttagtattgctggccttgtagctgttttagcagtgtttgcgcttgggatgacaaatgttctttctgtaaatactaatgctgaaaaacaacaaacatccgttaaaaccacaacatccacaaaagatactgagaaagaaaccaaaaaagaagcagaagagaaagagaaagaaaaagaaaaaacatcaacggatacagagaaaaagaaagaacccgaaacaaataaagctgcgggacaaaatgatccgacccaaccagataataaagataaagctgcaaccccaacccctacgattactcaaacagtagctattggtgattcggtaatgcttgacatcgagccatacttaaaagaagcagttcctaatgtgacaattgatggtctagttggtcgacaattgcgcgatgctataaatactgcaactggttataagaagtttaatagcgaaaacagctcagtaatattagaactcggcacaaacggtccttttactgaagatcaactgaatacactattagaccaattcgataaagcaacaatttatctagtcaacacacgagtccctagaggatggcaaaatgaagtaaacaagagcattgctaacgcagcctcacgtccaaacgtgactgtcgttgattggtattcaaggtcaagtggtcagtcgcaatacttcgctcctgatggtgttcatttaactaaatcaggtgctcaagcctatgtcgcgatgttaacaagtgtaatgaaaaaatag

SEQ ID NO: 2054 - DNA, 1677 bp, Listeria innocua
atggtacaattattctcagcttttgatagagaaaccattgaaagaaatttacaagaagaaaaattcgatttagtcattgttggcggcggtattactggagcaggaatcgcattagatgcaacttccagaggtatgagtgtggcgctagtagaaatgggtgacttcgcaagcggaacttcaagtcgctccacgaaattagtccacggtggcttacgttacctacaacaatttgaaattaaagaagtagcagaccttgggaaagaacgcgctatcgtttatgaaaatggtccacacgttacgactccagaatggatgatgttgccattccataaaggcggaaatatgggtaaaacaacagcttcctttggtattcgtttatatgactatttagcaggcgtaaagaaaaatgaacgccgcaagatcttaagcgccaaagaaaccttagcaaaaaacccatttgttaaaaaagatggcttaaaaggctctggttactatgtagaataccggaccgatgatgccagattaacgattgaagtaatgaaaaaagccgttgaacttggcgcaaacgcaattaattatacaaaagcagaacacttcttatatgatgataaaaaacaagtggttggcgtgactgtaacagaccgtctaactggcaaagcttacgatattaaaggacatcgcgtaattaatgcagctggaccatgggtagataaagtcagaaaactcgactatgctacaaataataaacatcttcgcttaacaaaaggtattcatttagttatcgataaacaaaaattcccaatggaacaagcggtttatttcgatacaccagatggtcgaatggtttttgctatccctcgtgataaaaaagtgtatgttggtacaacggatacagtttatgatgaagcagtaattaatccaaaagcactcgaatctgaccataattatgttattaaagcgatcaactatatgttcccagatgtgcatattagcgaaaaagacattgaatcaagctgggctggcgtgcgtccgcttatttacgaagaaggaaaagatccttctgaaatttctcgaaaagatgaagtttggttctctgaaagtggcttaatcacaatggctggtggtaaattaacaggctaccgcaaaatggctgaaaaattactagacggtgtatccaaaacattgtccaaagaaactggtaaaaaatataaaccagttcaaacaaaacatttacctatctcaggtggagacattggcggttcagaacaattagaagcattcctttcgaaaaaagcgaaagaaggaaataatcgtttcggttggacactagaagaaggtcgcgaaattgctaaacgatttggtagtaatattgatcaattgtttacctacgcgcaagaacacaaagaccaaaatgaaactactctaccaaatagtctttatgcagaacttcgctattcgattcaacatgaagccgtaacaacaccgattgatttcttattacgccgtacaggttacttgctgtttgatatgccatatttacttgaatggaaagatgcggttgtagatgaaatggccaaacaattccactggagcgacgatgtaaaacaaacttatatagaagaattaaatatccaaattaatgatgccagagaaccagcagattggcatgatagataa

SEQ ID NO: 2055 - DNA, 1092 bp, Listeria innocua
atatccaaattaatgatgccagagaaccagcagattggcatgatagataaaagaatcataaaaagagcgcatttcttccagatttgcgctttttttatgaaaaaaatcattttcgctattttcaagaaaccattttcatggtacattgattacaggcgaaaaggaggtttttttttgagtaagattcctgttatcgtcatcgttggcccaactgctgtcggtaaaacaagtcttagtattaccttagcgaagaattttgatggagaaatcattagcggcgactctatgcaagtatatcgtggattagatattggtaccgcaaaaatcacaccagaagaaatggatgggataaaacattatctaattgatgtaactgacccagctgttccttttacagcagcaaaattccaagcagaaacaaggggcttaattgaatccatacataatagaggaaaacttccaataatagttggtggaacaggactatatattcagtctgttttttatgattatggttttggaaatgcaagtgaagataaggcttaccgaagagaactagatcaattggacaaaacgactttatggcaaatgttagatcaacttgatccaaaaagcgcagaacttattcatgaaaataataaaaggcgtgtcataagggctctagaagtgatacatttgactggaaaacctttttctgaatatcaagttcatcatacgttaaacgaagcatatcaacctctttttctaggacttgatttagacagggagttactttatgaacgaatcaataggcgcgtagagctaatgtttgaagaaggactagtttcagaagcatcgaagctatatgatgaacatttagtcgatgttccagccatacgaggcatcggttataaagaattatttacttattttgatggaaatagttcgcttgaagaagcaaaagaattaattcaaaaaaactcgcgtcatttcgcgaaaagacagttaacgtggtttagaaatagaatggatattgactggattcaagcgggtgttagcacaactgacactgaagcaatggaaaaagtgaagacctttttagcatctaaataa

SEQ ID NO: 2056 - DNA, 1245 bp, Listeria innocua
ctgaaaaagggagatgtacttgtggaacgggagaaaataatacttgtaggcgtcatattgccaaataaaacagaagaagctttttggaactccatgagcgaactccatagccttgctaaaacggcgaatggggaagttatggatgagttgattcaaaaattagaacgcgtgagtcagacgtccttcataggttcaggtaagctgatggaactttcagagttagtggaaatgcatgaagcggatgtcgttatttttaatagtgaacttagtgctacacaagtgcgcaatatttctaaaatagtggatgcccgaattattgaccgcacacaattgattttagatatttttgcgatgcgagctaagtctaaagaaggtaaactacaagtcgcctatgctcagtacaaatatttactacctagacttagtggacaaggtgcctcgctttcgaaattagggggcggaattggttcaagaggtccaggtgagtcgaaactagaaatggataaacgtcatatccgcgaaaaaatgcatgatataaaagcgcaactgacacacgtcgagcgacatcgcaagcgtattattgatagaagaaacacccaatccgtatttcgtttcggtttaatcggttatacgaatgcgggaaaatcaaccattttcaaccgtctaacaaatgagacgacacttgaagaggataaattatttgcaacactcgatccaacaacaagaaaaattcgatttgaaggcgggttccaagcacttttaacagatacagtaggttttattcaagacttgccaacaactttgatcgcagcatttcgttctacgttggaggaaaccgcaaatgttgatgttttaattcatgtagtggatgcctctgacccagattacttacagcatgaaacgactgtaataaacttgctagaagagcttgagatgagtcaccttccaacattaattgtctataataaaatggacaaagcgccgtctacattcgtacctgatcgcccagagcacttacttatttcagcattagatcaagatgctcctaaagaaataaaacaacgaatgattgaactaattgagaaaaactggactttctttacagtagatttatcagaagaaaaaggtaaagagttagcgcaaatgaaacaacaagcatggataacaaagcttgaatatatggaagaaaaagcatgttaccgaatcgagggttatcgacctagaaaggaaactactaatgactga

SEQ ID NO: 2057 - DNA, 81905 bp, Listeria innocua
aggccactgaaaatgtaggtgaaagtcgtttaaacgtttttacgatttcacctctttgttttcgctataactcttcattctataagagggccccgtaatttggatcaatttagagtgatggaccaaccggtccagtagcgcgttggtaagcttcttgtttccaaatatttcggaccactgggatagtgggatattggttgtaacaatcgtagattttctttcataccgcatattaatcagctgaaaaagtaagttggaaccttctttggagaaaggtaaatagccgacttcgtcgataatcaacaccgaataacccgaatatttttttagcatcgtttcgctagttccgcgcttgtgagcgcggatcaaacgattcactaattcagtgctcgtaatgaacaaacaacttaaaccacgatcgatacattctaatccaattgaaacggctaaatgggtctttccaacaccactatttccaataaagagaatattgtcatatgtgtctaaaaagcgtaatgttaataaatcctgcatttccttctttttttatccttggttgaaaatcaaaattgaaatcatggagtcgtttgtggtaggggaacattgcacgctttaatacctttttttgactttcttttttacgataactaatttcttgttgggtgagcttgttgggtgagctcgaataaagagtctacaagcgatttatcacttttggcaacctcatctaaatgggcagctagattttctttcatgcaagataaattcaattcgtttagttgatttaacaattgatggtaatgggacatcatttcctccttatagatcgtcatatgcatgtaaattatcatcgacaaatcgctctaattcttcatcttctaaatatttaaatacatcggaacgcaaaatttcaagcgagtcttcgcgttgataattaagcgctttttcacttataggatgggttcgaatacatttatccccataccaaacaaatagattgtccctacgaatatctaacgtcacttctttcccaatatatttaacaggaacagaatatttagcattttgatattgaaccatggactccatcgatacctttctcagtagacgtttatttctagaaacatagctgagcaattctaaacgatggatgggagctagtatgggaagctcttcctttagtaaaaccgtcggtttgttgtggatggcttgtgagacggagccattcagatcttgcatcaattcatatatgatctgttttaactcttgtacatctgtaaattcataattaaagaccattaaacgctcaactgttcgggctaatgcttccactttcccttttgtttggggtctaaaaggacgacaagcaatcggatggaatccagcatctttcgcaaattgccggaatttttcattgaaaacagtttgtgtgaattgactcttactacggtcgacaacggttttcatattgtcaaaccaaatttcttgaggaataccgtttccgcaatattcaaaggcattgactaaacactgaaaaaccgtcggttgtgttcgatcaaaagtgagctctaagtacttcattcttgagtaaccaagaatatagagaaaaatattgaaataaaacacttcaccgtctcggctaaccattttaacgttttctttccaatctacttgagcagaaagaccgggtgtggtctcaatgcgaatcgttgctttttgtactttttcttcccggtatttacgacaataacgtttaatcgttgtataactccctttataatcttttttacctaagaaataaaagatagaagctgccgaacaatttaattctaatttatcacgaataatttcttcaaaaccatgaagcaaaggagggaccgaaggttttctctctctaagcttatctaaatcccccgtcaatccagcttcataatagcgtttaaccgttcgataatcacaattatattgtttggcaagggctgcgaaattaggatgaatttcattcataatgtgtagtaacactccttctaagacatcttttctcatgattcactctccttggatagtttcatgaaaaagaatatcagatttgtcatgtacctacattttcgatggcccttttcctacattttaatatggccctttacagcttactgcccatttatctaattcgaccaaccaatcttggttcgcttttggcacacattcaatgaccttttgtccaccatacatgccagatagcttcaattcccctaagactttttctggatgattgtaaaaatacgtgttaattcttccttgactatcttgaaatcctgttgtttgcacccattctggaatatcttccaccacaaatcgttctttttctagcttttgaagaagcaggatatcagtggttgcttttgtcccacccaatccggaaaatgctgtatttggtaaccttaccgcacttattaaatcagctcgttgcgctaaataatggcgcgctcgactatctttcttatccattgttcctttgctagtaacaaaaagaatatatcctcctggcttgacgagatctaaacttttctcaaagaaataatcatggatcaatttatgcggatatcgtttggatttatcggtcacattaaagtcattaaaaggaatattcccaatcgcaatatcaaaggtattagattggctattcatttcttcaaagccttttaattgaatagctgctttcgggtataatttttttgctattctaccggataacttatcaatttccacaccagttaaagaagcagtttgataggccttaggcaaccgaccaaagaagtgacctatccccatcgatggttccaaaattttttcgggttctacatttaggccttgaagaacttggtacatgcgatcgattaaagcaggttctgtatagtaggtcgttaaagttccttcaaatgctgcttgatattcttcaggtgttagtaactccttcagttcgagatattctttttgaaacgctagcttgttttcatcaaaagcatccgcaagaccaccccaccctgagtattgcgctaatatattgcgttcttcgctattagcgaaccgattctccgtttctaatcgatgcagcaagcgaatggctgcaatattcgcttgaaatttagcttttggaccacttggaaaggtgaatgtatccgcaaagcgaaagttctctaccgattcttcctcattatcttctaaataagaaatttctggatcttccatgtagtttgtttcttctgcaaataaatcgacttgttctcctcgctcactgacaggcataaaaaaagaacctgatcgctcagattcttttacttcttctactatagttggttcagaatgatctcctctgcttgcatccgaagcgatttcagacgcttcgctctcgctaatggttccatctcggtcggtaagctttctttcgtcacgagtttctcgtaatactggttgatcttgtcttgcacttgaatttccattcgtttcacttcctgaagataatttccgtttaacttccatttcatcacttgaagcgatttttctttctcccatttcaattggatcagcttcccgatctttccaatcggcatcatttcttctgacgtttctatctctggaagcaggttgccattctcttcgcgataactcatcttcaaatttgattctgtcatggtaaagcaccctctcttttttcagttcattatttaaaatgcgttccacatcttgtaaaaattcctttgcggttaaattggcaaaatgttgtatctccagtaacgtattatctcttttcccaatctgtaaaacgctctgtacatctagtagtaaatcctctggtattagtgtatttgttcgttgatagatgatatacgctgcaaccacttcaatatcttttacaaaaaacggatgaatctgatcacctattggtttttgataggaagctatttttgcgtgaatgccatcttcccaattgacaagcgtaccactctgtttttcatatgtgttccaatatcgaagtaaatcatttttgtcattatcaagtaactgccaatcaaatacctgaaggggttctccgcctgtttcggatatatcaaagacatactttctttgttgtgtcgtgtaatcaaatagaagcgctgcagtagatccgcgtttcacaaaccgaccaagctttttccaaatatcaaatgtcgctaccatgtggacatcttgtttttgtgcatataaaagcagctgttcatcaaagctatatttatgcaccctgctggcgaaattcaaaaattcgatgtaacggttctcattgctcgtaatttccttcatcgttccttcgtaaagtgtggtaagtgaaggtctttttttcttttttctagtttcttcgttcatgtcttatgctccttcttgctgactccttcttgctctcatccattttgaaatgctcgttttgcctttataaatgataataaaaacaatcgtaagtagaaaggtagctacaacgattgtcaaaaaggctttgacaaaaaaagccattaaagggaccaaaaacagcgtagctactgcgacaataataaaatagcgaatgataaatacgacaatcatacaagctaatatagtcataaccgtccaccatgcccatttcatctgaccgcttgcttgatacgcatgatataaagcagtaaatacgttttcaatcacaagtaaaatgcttgtaacaatgatactaactaattctccaaagaagtaagcgatccgatcacatatatctaaaaatccttgtatgatagacatttgtcttcactccttttcctataaaaaggaaattatatttcttaaactcataatatacttatttgatttcattttcaagtgataattacattcttttttatagaataaggaaatatcttttctttttagaaatttttgttatacttaaaacgttaaataaaggagggatcaccatgactattcaacaccaatttgctgaaaatctttcgagattaaaaaaagaacatggtctcaaaaatcatcaaattgctgaattattaaacgttcaaacacgaaccgtcgcttactacatgagtggtgaaacaaaaccagatattgaaaagctgatccgtcttgccacttacttccatctatcgatagatgaattagtcggttatgttcaggaagacaaagtatggaacgatttgtccctaaagcaatggttactatccctaaatttgagaagcgaagaagaaatcgcgaaaattaaaatattggttgataccgttgaaactttgtatccaaattaaaaaagaaccccccccgataccagggaggttctttttcttatctttctagatcctctatacttttttctacctctcctaattgcaaggctttattctccttagctgcttgatttttagctgcaagattttgtatctgtgcttccgtcacaccataagcctccattttttcttttgtaagcacgataccttcactgaagtagtccaactcgaagttatttttacacacaacttgaatttgtttatcagtaaggacttgatttttcgctttcaatattttttctgtctctggaactacaatcaaaactcccacaccttcagccgcaacttccattacttcacttcgtcttatacgtgcaagttctggcatatcgatgttattaaaataattcgtaattacattgtgatcatctccccttactccctcataggtggaactcgtcatttgaccatttggccataaatgcatcgcttcttttatatcatttgtataatgttgggaagtgtcttctacatattgatccaatgcttcttggttaaataatggatgtttttcttcttcatatttcattgtatttaccactccttttataatttggcacaaaaaaaagaacttcctttttaggaagttcctagctatctaattatttttgaaaaaaactcctcactgacgtaaggaaccttttatcgttctaaatcatccttttgcttttttggcaactggatttgttctttttccgtagatctaaactgatctacccgttctttttcttgagccagcttttgttttgcaaatgtatggaagcccgaaacatcttgattggctagatacgtcatgtagaccgccttttcttctgacttgataatcaatggtggaaaatcattttccatcaataggtaattcatgaccatccgtccagttcgcccgtttccgtcgctgaatgggtggatacgttcaaaggcaatgtgactctccaaaatagtttctagcttatcgtctttcgaaggttctttctccaaactttcttcatgcgttcctaaacggtaattgacattatctacccattgttgcacgagtaagggggtctcttgtggactcgccgtctggaaatctgcaccaagtatcgcattggcactcgctttgaactcgccatgatcatactgcagtcgatccgttaaatacgcatggatctgtttgattgttggaacactgatcggtcgtaatgcttctatctcttccatcacataagcaaaggcttgttcatgatttttcacttcataaatttcccgaagatcgtaactttctttccccgtcactttattatgcaagataatagataccgtgtcggcgagcgatatcgtattcccttcaatcgcactggaatggtgggctaaacgtaccaatacatcttgtaaatattcgttaggaaaccgttggtttgtatgcattcttctcacctccttttcattatagcgtaatcccaagcgttgtacatgattttaggctgcttttatcctctggatgcagcacgcctatccgaaccatcccttttattttcactggaataatcaaccgaatgtccacaaaggttggtttgaaaagcccttcttcgatccacctccttaaagggattcccttaggctttgttgtcattttatgacaccaagcaatttctttttctttatcaatctttaaaactactaccggtctaactttcctgttcgtctcttcctgatacatcaccgtggtcacacaaatgtcgtccggttgaattaagcacgttctccgctttgagcgtgctttcttgttcgctttatattttttttgcatccaatatctcctactctctgtccattgatttttctctttccatttcctgctctagttgttcaaatgcgcgatcatttttccattttttgtacgaattatctaattcataatccatctttttcaactgatagatcaccgacccccgtcgccggcgataacgggcaattttatcttttggagttaaagacccttccttttttaaatttccctgctgatctaaataatgatgatctgatttggaatgattgaaacgcttatcataatttttaacttcttgtagcacttgatttcctagctgcttgtataatttttcatccttactttctaagtaagtgtgaatattaaattctgtttttttaccataggcttcttgttgtaagttaccttcatgttcccacgctttacgaaatacttgcatctcttctggatgatgctgcattaaataattcgttgtgatctgatctacaactttttttgctggatgtttgtttaaatttccataattccactgaccagaatgttttttatacatttgatgtagctcaagaaataaggcctcattttcatgtgatcgaatcacttccttcgacgcatgaagtggtgtaagaagttgttcttttgcataatcatcgatccgttggtaaatgcttcctcgctgtgctatttcactataaacggtactacgtacggctcttctagttgctggtgccatacgtccatctcttactggcttcccgtccgttcctttttccaactccggccgtcttttattggaataaaatttacgtgttggggttggttcagtaaccgagatatgcacatgaaaatgttttgtgtttttatggatcgctgctaaccaaatcgcactgccttccatgccttctttccgcaaaaaacttttcatcgacgcactagttacttgttgcaatcttttttcgtcaagcattcctatcttcggatcataaataccttgtttagccaaccactcgttatcaaaactgataacatgctggaacataacgctgttatttttttctgcagtttggaacgcatctttatattttttcttttcagcttgtgtcaacttcggttttccttctgtaaataaaccagatgtttttttcggatttcccatataatcgatatattttttattccgttctttttcctcttccgtacgctcttcttcattaccaatcatgctaaattctttgtaatgctcgtttcgaacggcttcatcacgatcaatatatttgatatagtttgaccagtatttcttcgacttatttaatggactgtttgggacaataaatttcgtcgctaaaacaataccggcggtaatcttactcatggatcggctccggtactactggaacattttgtttttttctgctcgcttctttcttttgatcacgcatgattttaaatcgacgttgcacttcttcttctgctttccctgtaataaaatgtttatctttttcgattgggaagaaagcttcttctggttcgtgattgaataagaagtagttgtttaacatttctttgacaacttgtgtgcctttctcagcattattcacacctaatcgaattcgatcaaataatttttttgaatctgcatattgatctctcatcacttcaaagattgcttgttccctctctttttccgaaaacatatggatgataaaattaattgtttcagaatcagatctaagtccatatcttttttttgctttcatcataatttctttcgattcactcttcatatcaaattcttttctagccatgttatatcctcctattcacgaatttcagttaatagttgttgtacattttttgttaactcaaagactcccatagacattttttggaaagcctcttcttgttttccaataagatgattggtttcttccaatgcggcgatgcttgtcaaatactgacgcaaaaaactttcgcgagacatctttttttcacgagccatttgatccaattgcttcacgacagctgcatccagatcacgaatttttatttctgccaaataattccattcccttcgtttaaagaccgcacgatctcgcttacagcgaattcgtacttggtcgaacccgggttccccggtttcttttttattttaaaatcaagtgcaatgattcttttaaacaatgaataatctattgagattatccactgtctaaaaagagttatccaaatttacgaagtaaatggataagagcataatacgtttttgcccccaaaataggtttggggcttgtcagagacaaggaaaacggtggggtcactttttttcgtcgttacggtggtttatccgtatatcgaacttcctagaagccggtggatccaccgtatatctttctacctgttcctggtggttctaccgtaggtcgaacggaacgatctcgggttctgttgcaaagttttaaatctactatcaaataaggtagaataatagaaaaagatagcaggaggaatgacgatgaatcattttaaaggaaagcaatttcagcaggatgtgattattgtagccgtgggctactatcttcgttataaccttagctatcgtgaagttcaagaaatcttatatgatcgtggcattaacgtttctcatacgacgatttatcgttgggtgcaagaatatggcaaactactctatcaaatttggaaaaagaaaaataaaaaatccttttattcatggaaaatggatgaaacgtacatcaaaattaaaggaaaatggcattatttgtatcgagccatcgatgcagatggtttaaccttggatatttggttacgtaaaaaacgggatacacaagcagcctatgcttttcttaagcggttagtgaagcagtttgatgaaccgaaggttgtagtcacagataaagccccctctattacaagtgcctttaagaaactaaaagaatacggcttttatcaagggacagaacatcgtaccattaaatacctgaataatttgattgaacaagaccatcgtccagtaaagagacgcaataaattctatcgaagtttacgcactgcctcacccacgattaaaggcatggaagccatccgaggattatataagaaaacccgaaaagatggcactctcttcgggttttcggtctgtactgaaatcaaggtattattgggaatcccagcttaaatcatagataccgtaagggattttattctttatttaaaactttgcaacagaaccgattgtcaactcttaaattcctttcgctttgctccagtcatacatttaaagttgacaatcacaaaaattttacctctataaaaaaacatcaaaacagtttaatttgttcaaaatcaggttccttattaacacttttattcaaaaataacggttcgcttttcaaaagctcaatttcttctaaagatttaatgacataaaattctttagtaattgttaaatacactaacactcttttattcaactttactaaattatatatattattaagagttcctttacttttaccattccaaatcataaatccataatctgcagattttaccattgctaaatcttttgctgcataaaaatcaaaacctttcactgttggatccacttcaacattattaacttcccattctccaacattatttctcgcttttccatttgaagcaaatactgtaacagaagtatattgatgctcaaaacaaaactgttgcacctgcttatcaacaccatttgcatccccaacaattatattgaaattctgattaataatattctcaatacgcttcttaacattaccattcaaagctttaatagctcttggaccggcaataaatattttcatcttaaatttcaacctcacttattcttagttttagtcatacataaaacatatatattttttatatttttatcgtttcttaaaacatttacacattcagtcaatgtctgaccagattgatataaatcatcgaccaacaaaacattagcttcaacaagaaacattttctttctttcaattgtacctaccaactttttcttatcttctaatgttaaatttttcgattgattactactatttttattcaaaaccccacaacaaatatctttattaataatttctgatactttttcacatataacatcgacaggctgaaaatctctttgtgttgaagaaggtacaggaataatgtaatctaccttattttctaaatcaatttctttcaaaagtggttcaataatttcaccaatatcagtaattttatctcttttttgttgatactttaattcatataaacattgtcctaattcacttctagtagtgtcaaaaatcaaattcccatactcattctcacctaaacatgtacttgataatacatgatgatctaaagcatacccttcatcccaattaccagtaagatttataactcccataataaaaaccccatttcatatataataatttttcaaattccagttccactgtgccacaatcgaataggctttttcttctgtatccgaatcttcatcaactcgcactaaatcgccatcttctatatcgtctaaattcaactctttatgaacttgttttaacaaaccaccatacgcaatcattcgtttacgaaataaacctttttccaagtctttcacaacttccaaatcattcactacatttcctgttaaataatcggaatcttttacggaatatttcgcagtttcttgtactgctgcttgaatcgctgtgtactcactttttttatttcgctttttgttttttacagcttcaatatgaacaactggtgtgtaatctaatttcattgctttttgccaaagttttgtccaatcttcttgtgataaatagttatcatcattcttaaaataagttgattctacacataataaaacgtgcatatgttgattatatgaaccatctttttcattcactgttatttccgttgaacgcataaacccaatcatattttttgctacctttttgtacttcatcaaacgattaaaaccaatcgccatttctttcaaacttttatctaattgatcaccatcaaaaacgttctttacagaaagtgttaaaaagagccatcttgccctcggtttttgtcgaataacttcttctacaattttcgttgtttgtacacttcgtttcatcgttttcctccagttacacattggacataacggtgatttacagaaccatgtttttgctaacttcatacgtccttcttgtgtcacatcaaattctaaaatttcgccacattgcgatactcgttctgctttcttaaatttcaaaatttgcagtagctcaaaataattcacattcgctgtttttttctcacgccaaggttgcacttttccgttcgcttttttatcgcaaagtattgtcttttcatctgaaatcatgctattatgaacacacataaaactataaaatctcctttttgattccacgtgaattaaaaaagggtacaaaaatcccctacgtgttattttgttttctcgacaattacattctaacacattgggatttttttgtatatttttctttcaaccatcaaaatagacttgagcccagtcataccaaggatttgagcctatttcagaaaatcttgttatttctatatgtatccagtcataccaaggatttgagcctatttcagaaaatcttgttatttctatatgtatcaagggacagaacatcgtaccattaaatacctgaataatttgattgaacaagaccatcgtccagtaaagagacgcaataaattctatcgaagtttacgcactgcctcacccacgattaaaggcatggaagccatccgaggattatataagaaaacccgaaaagatggcactctcttcgggttttcggtctgtactgaaatcaaggtattattgggaatcccagcttaaatcatagataccgtaagggattttattctttatttaaaactttgcaacagaaccatgaagagttatagcgaaaacaaagaggtgaaatcgtaaaaacgtttaaacgattttcacctacattttcagtggcctaaaaccaacattttaatatggcccttgacatcttcatcagcgtaagttagatttgttgaaagagcagaaaaaaggatttctacaaaaaatgtttgtttgatattttgaatagaaaagagagataaagtgaagtttttaaattttttgaactataaatatttaaactgggtattatatggtattacattattttttattgtttattacttttttaccgatgatgatatttttttaattttagcaatactttttctcgtttcatctaattttagtgataacttaattgaagttcttacagaaccagaaattcggtctatgacggatgaagaacaacagattattaaagctatgattttggaaaataagaaagacgtagtagttatcaaaaagattagagagtatacaaatttagatgttttacaagccaaaaaagtatatgaaaaaataaaaagggtctataattagataataacccctatacaacgctattaaaacaatccccgttatctattggacaggtaataggggttgtttttatgtttttttatataatagaaccaaagatggagggattatttgggatggtaggcatgcttttacgctacgataacgcctgttttaacgattatgccgataactgaatgaaataaaagctaaaagctcctagaaacgattttaagcactttacagacgttttgaataatttctaagtaaaaatccccgcctggttagtcaaaatcgcttaaaacgcaaaatatgacgttctagaactattcaaaacaaaaaaaggaaaatggcattatttgtatcgagccatcgatgcagatggtttaaccttggatatttggttacgtaaaaaacgggatacacaagcagcctatgcttttcttaagcggttagtgaagcagtttgatgaaccgaaggttgtagtcacagataaagccccctctattacaagtgcctttaagaaactaaaagaatacggcttttatcaagggacagaacatcgtaccattaaatacctgaataatttgattgaacaagaccatcgtccagtaaagagacgcaataaattctatcgaagtttacgcactgcctcacccacgattaaaggcatggaagccatccgaggattatataagaaaacccgaaaagatggcactctcttcgggttttcggtctgtactgaaatcaaggtattattgggaatcccagcttaaatcatagataccgtaagggattttattctttatttaaaactttgcaacagaaccttattttctaacactgaacatcgaacgagtaaatatttgaataatatcattgaacaagatcataggcctatcaagaaaaggcacaaattatatcagtccataaggactgcctcatccacaatcaaaggaattgaaactatacatgctttatacaaaactagccaaagagacttttctctctttggcttttcagtgattcatgaaataaataatctaatgggtgttccagcttaaaattagaaaatagttgagatatcattttacttctttgaactttgcaacagaaccgaaaataaaccttcagatttaagtcgattgaacgcactgcttagcgaaggagctttgtccgttacaaaaactctaggttctccaaattgcttgattaatcgtttaaagaaagcataggccgcctgtttatcccgattctttcgcaaccaaatatctaatgtcaaacctgtagaatcgatggcacgatacaaataatgccattttccttttactttaatatatgtttcatccattctccaagaatcgctagcagacttatttcttttcttccataggcaataaataatcgaaccatattcttgtacccatcgataaacagttgtgtgacaaaccttgattccacgctcattaaggatttctgaaacatcacgatagctcaaattgtatcttaagtagtagcccacggctaccatgatgatatcctgtttgaattgtttacctttaaaatgggacattgttattctcctcgtgtagtttcttccattctacactaaataatcagttaaataaaactttgcaacagaaccaattgcgctattaaaagtaatcgtatctgcaatattaaaatgtgtcccattatcagtactcatattttattttctccataaatgtaatttggatctattatatcatttaaattaaaaacagcccccattatctattgattagataatgggggctgtcttaatagtgttttagaggggcgattatctaattatagtccctgtactactcttgaatctcaaattctggtaattcatcaattaactcaagggtgcgcatacttacggtaataacggatagtaagaggttcaaaatatacttaggatcgtcactaaattcgttaggatcgtctgtaatacctgattttttatcagtttttacttgatactgatcaataatccattcgatagctggacgtccatttacaacatattcataggctttttcaggaatgtttttaatggtgatactctcattgtaaataatcgtatctaatacaccctttttagggtgcttcatctttttaacacgataatccagttcagatatttgaacgtcaatgccttcccaaattggttgattttcataattcaaatgtaaatcagctaattctttaccaatttttatatacttttctttatgcttaacattaggaatttttggaaatgattttgctaaatcttcataatatttttccccatattgtacgctatggaaaacgccgtaaatatagtacatcgcatcttcttcgctcaaatttgataatctctttaggacttccggacgaatcgctgaatatttttcatcgctatcaaaaagaccaccgttattattattctgataaaggtattttggtaaattctgtgaaccgcccgcaaaaatattcctatctggtaaaacatcaagtattaaggtagaaaactgttttcctccggttttatttgataacgaaatcatcaaatttgaagacgtggagacaggcaataccttagacatttggtattgcctgtctatccacgcttgtgcgtaatagacatgcttcttggtaaacggtcgatacatcccaagatatattctgtcaccttgccaagattgaggttctctacgctcataacgttgtttcaatgaacgagtccaagaaatatcagagacatcttctttataaatatttgtatcaccaagatattgattataataatcaatacttgttttcatcgttatttcaacctgagactgagaaaagttccatgaccaatcatctctacctgttgttatcccaccagtataatcaataaaaagagcattctgtgtttttttatttcctagagatataagttcatcaaaattagaattacgttgatttatccaatcacctttttcatttggaattatattttggaattctgaagttgctccatttaaacttttccagttcttcaatttttctaacttctgatatttatcaagattattcccgatatctaagtaatgaatccgtcctttccccgtataatctgatttcttaattaacataataatagtgacacctgtcataatgtcaaaaatatttccaccctctaatacagactgatctttagttttaccacggattccacctttaagattcaaaacataaatatcagaaaattcttccaagagagattgtcgcataccgtccattgcgtttccatctatgaatgaattgtttgtaatgaatccgatcacaccattatctgagattctatccgacgaccaacgcatagcacggatgtaggaatcaaaaagattattcttattagtagctgtcgaagtttcaacccaagaattttgcaaacttgcgtctagtttttcataagtagtcctaatttgatttccatcctcatttttttgtttcgcagaatatggtgggttccccataattacagtaataggtattgattgttgacgttttaagcgttcatcattagttccaaaataatcatcatccaaggtatcttcagtctctgtactctcaaaagtatctgttaagacaatcccttcaaaaggaacatatccttcttcatcaccgtttatttcatcaaaagtcgcttcaatgttgattgctgcaatgtaataacttaataaaacaatttcattcgcatgtaattcttgagtaaatttacgggtaatatcagctaacgatatttctccagcatccatttgttcttttaggtaagtcaacgttctaacaataaacgtccccgtacctgtaaatggatctaaaacatgcacgccttcactagctaatgacttgccaaagtgttgtttaagcacatcatcaacggaatgaacaatgaaatccaccacttcaattggtgtaaagacaatacctaatctttcagttgttgctttaaaagcagttttgaagaatttatcatacaaagtaacaataatcttttgtttgtcttctgctttttcaatcccttcagctcgcattctgacggattcatataaaggctctaggttttcttgttctttggcaaaaccagctttttctagctctgatacaattgattccatcgcttgggagacggggttttgattcacaaaactatattccgcaaatagtgcttcaaatataggttttgtaattaaatgctgtgatagcatttccgcagcttgtttttcatcaatactttcgttgatattatgttgtaatgatgaaacgaattttttaaattctaagctaatcggatcttttttatctgataacttatttttaatccagttaatttgacgctcggcaattttagcaacatctttcgaccaattctcaagatatttacgatctccaactttttgaacaattttaccaaaaatagctccttcaaatttatcccattcaaactcaagttccgtttggacaggagaattttcaatagttttatcttggtcattcccttgatctggagcactccctacaccaataacttttaactgtttaggttttgccatgtttaacttatcaatcattgcttcaaatcgttcatcgacagaacgtaacgcattaatcacttgccaaactgtttcgtaattcttgttattgtctaatattgtttctggcttttctccagttggaataacaattggtaagataatatatccatagtctttaccttcagccttacgcatgatacgaccaacagcttgaacaatatcaacttgagatttcttaggagataaaaatataactgcatcaagtgtcggaatatcgataccctctgttaagaagcggacattagaaacaattcgagcttcattggctggtttattaggatttgctaaccaatctaaaatctctcctttttggagtgcattcatttgtccatccgcatgacgcattgataaatggatagattcgtcttcaatagcttcgctgatatattcattgactacttcttcgaattgacccgatacttttttcgattcttcaattgttcgtgtaaaggcaatcgctcgttctaaaggggctccatcataaggactatttttgataggattcttatagccattacggcgcatcattccgttccaaatccccacaatacgaccaacatcatcaatattcaagccattttctggatcagcaagcgttcgttgcatatctttttgaattgctgcttcatcaactgctaaaaccatcactttataatcggttaggatatcacgtgaaactgcttgaccaaatcccatacggaagaacacttctccatatttactttcatcatccattgatgagagtaaaatactcttgtctttagcattttttttagcactttccccatatatctttggtgtagctgtttgatacattcttttcagcccttttacattggtattgctgtgaactttagagaatgcactggcttctttagttgcttcatgagcacctgtcgttctatgagcctcatcagagataataaaatcaaactcaggaaacccttctttttgggcttcaccaatgacttcaatactctgatacgtactaaaaacaacgagcatatcggttggttttggcaatgattcaaaatcatgccagttttgcaatatctttttactagaagtggttgctggataaccaatatcagaggcttttatatcctcagttccatctgtaccacgtgacgcatcacggtcagatgtaacagccatactcgttattgtaagttcagtatcattattccaaccacgcaatgtttgggtcagcaattggatactcggaacaagatataacactttaaaaggaccagctttatctttagctagagcttcagaaattttaagactagtgaatgtttttcctgtacctggcgccataatgagttgaccacgttcattttctttaaaatgagaaagtgcattatctttggctgtttgttggtactctcttaattttttaggttttttaacgactacattttctggacgttcaaaattaaattgagaccagtcaatttgagagtttctaaggtctgataatccaatgatttcaatccctttttcgttctgatcaatcgtctcacgtgcattggaattccaatcatccatcgtagatacaataagccctcgttgataataactttttcctaactcagcaacaaaggaattaatttcagacttaccaaccttatttgtataaaatttggcttgtatcgcaaccaaatcaccatttttttgttcagcaactaagtcaacacctgtatcttttttgggaataccataagattcaggaacttctgacaataaccatacattttgatacaaggctttgtaagttggttcattttttaaataagccaacgttagtttctcaaaaagcgtcccacgttctctttgtacatctttagaaacagtattaatctgattaattaaatcatcaaaagtttgtttagtcattttacattccttccaaaatgccaccattttttattttttgtatgaagttcttcttttgtattatctatgtctttagattttcgtaccataggatctttatcatcttttcgtactggtaccatcaaagattttaattccttgatttcttctttatattcttcaagtaattttttatcttgtaaggctagacgttgttgttggtctaatagcttatgaaggtcttttttttctgattggagttcggacactagattccttaaaaataaaatctcttcattcccctctggattgtcatcaactgaattattcacgttgtcgtcaacaaaaagtttttgttgacgttttttagttgacgttttgttaaaaaaagcactcttaataactttttgaccgtcaacgtcaacgtaaacggtatttcctttttttgacgtaagttgacgtaaatctattgacgattctttttttattttttgccatacagcttgctttgaaacacctatttcatccgcaagctctttgattgtctttaacttttcactcatcataagtcctgccttttaacggttgataggtattgctcgattgcttttttgaggtacttagcgatattgtgcttagaatattcttcacgcttgctagagacataacttaggtggtctttgacaccattcaaacctcgtaagtctttaagttcgtcatagagagggtacacgtgtgcttgtaagcctgaaagaattttagtatccgtcaagtctagataagacaataagaaatgttccataagcaacttggtatacggactttttagggcttgtaccgtcagcatgtcttcggtttctgctttacgtgctttatcttcttggtagactttatcttccaacttgtagctgttatcgtctgctcgacgttttttcgtaatatgaaagacgatagaatcaatcgagcgcccctttttgactttgtcatacgtcacggtaaaagaagtatgatcattgatttcttccaaaggtttttttaatatccatttttctaaatctgcaaaaagtttatattcattgactatatccgtcatttctcgtaattctcggattgaaattgaaggattgcggtaggcttccacttgttcttctctccgtccacccttataactataatgctcgtattggttataattcatggataaccaacgatacaagatgatagaatgtttactattgagttctgaaatatcggacaaggcatgttgtgtgaaattctttttaagattgattagataaggcatgatttcaggactaaatcgaatagtaacttcatcatgataatcggtccactttacatagggaatagggacgatattttcaaactcaaacccatgttcttttttttctttaattttgaaaaaagcttgtttctgcatattctcaactgcctgcttgaaacgactatgtttgtcattatcagaaactttaaaaaacgcaaaaagttcttcttttgagagatagactgtatgatctttaggcggttcttcggtatcaatgcacgatacggctaactcaaacattttgagtggggttttatccattttggcaatgcaggcaatgctggtaattaaagaattatgctccactacttttcgttttgataattcgttcaagatttgcacctgcttctgattttgttcattttttggtatactagtcatagaaaactgctcctttgagtgtttttagatacgcatgaagattctctcgacgaaaagtgtttcttcatgcttttattataccataatacatggagaaggtaatagacattctccatgtataaacagttttttctccatatattattctttaaccccttgaaaacactcacttttttttgacgcaaaagaataaaagattaaaaggttctgttgcaaagttcaaagaagtaaaatgatatctcaactattttctaattttaagctggaacacccattagattatttatttcatgaatcactgaaaagccaaagagagaaaagtctctttggctagttttgtataaagcatgtatagtttcaattcctttgattgtggatgaggcagtccttatggactgatataatttgtgccttttcttgataggcctatgatcttgttcaatgatattattcaaatatttactcgttcgatgttcagtgttagaaaataaaccttcagatttaagtcgattgaacgcactgcttagcgaaggagctttgtccgttacaaaaactctaggttctccaaattgcttgattaatcgtttaaagaaagcataggccgcctgtttatcccgattctttcgcaaccaaatatctaatgtcaaacctgtagaatcgatggcacgatacaaataatgccattttccttttactttaatatatgtttcatccattctccaagaatcgctagcagacttatttcttttcttccataggcaataaataatcgaaccatattcttgtacccatcgataaacagttgtgtgacaaaccttgattccacgctcattaaggatttctgaaacatcacgatagctcaaattgtatcttaagtagtagcccacggctaccatgatgatatcctgtttgaattgtttacctttaaaatgggacattgttattctcctcgtgtagtttcttccattctacactaaataatcagttaaataaaactttgcaacagaaccgattttcttgctttcgcttcgatggttgtcgttgaatgaatttgtaatacgtcgaacgatttacctgtaaagccctgcataatcgaacgatggtgtgttcatgttgaagcaaagaaatcgcttttaatcgttgttggagtgtggcgtgaatatggcaatcgctttttttaagattaaattttcctcctcaagttgtgcattccgtttttgaagctttttgacttgttgcgcagtaagaatggtatcatcatcgattttgacttccgaaaattgcttgacccaacgtgctatcgaagatagggcaataccgtactccttcgccaatgcattttgggatttcccactttcatacagtttgacaatggattttttaaagtcctcatcaaaggaacgagtaggttttctggcttttgtcatggatagttctctccttattctgaaagtgtctactttcttgatagtatagcagattttgtgtctacttttttagtatatatccagataaagaattatgaaaaccaagcaaataatttaatcgaagtacagaagcaaacacaaaatcttttagaccaacaacaacgactagccttacaagataaaaagttgttagaagaatacaaagcagaaatcaaagagttaaaatcattaacaactcaatcaacacctgctactttatccaaggatgttaaccaacccaaagatatagagatagataagaaaaaacgacgttggtggccatttggtaagtaaggaaaaatattatttagaaggggtgttgggagaaaatgaaaaattttaataatattgatgaacgtgtagtggatgatttaaaaaaagaactaaaagcacagagcaagttaaagattgctgcagcatcattttcaatctatgcgtacgaggaattaaaaaaagagttagaaaaagtcgatcaaattcagtttttatttactagtgatctatttacgaaagaaaaagcaccgaaagaaaaaagagagttctttattcctcgtctaaatcgtgaaagtcagctgtatgggaatgagtttgaattaagaatgcgcaatgaattatctcaaaaggctatcgctaaagaagctgcagaatggattcgtcaaaaagttacgtttaagtcaaatatttctgggcaacgttctgataatttcatggtcgtggaaaataaaggaaatataaatgtatatgcacctttcgatgaatttacaaccgctgaaattggaacaacaaaaggtgaaaagcttttttataatatttcaaaatttgaaaatgaaaatacacaacaattcttaaatgcgtttgagcaagtttggcataatcaggattatgtcgatgaggtcacgaatacagtattagataatattacggctgcatatcaagagaatgccccagagtttatctactatattgcgttatataatttgtttggtgaatttttgtctgatttagatcaggattatattcctgatgaacgtacagggtttaaagactcaaaaatctggtcattattgtatgattttcaaaaggatgctgtgttgggatccattagtaaattagagaaacacaatggtgttattttggcagattctgttggtttgggaaaaacgttctcggctataggagtcattaaatattatgaatcacgtaataaaaatgtcttagttttagtaccgaaaagattgaaagataattggaataattacaagaataactacaaaaacaaccccttagctgaagatcgtttacggtatgatgtcttatttcatacagatatggatcgcgaacgtggtgaaagtaatggaattgatttaggaaagataaactgggggaattatgatttagtcgtaattgatgaaagtcataactttagaaatggcgagggtactacacataaaaaagaagaaggtgtagaaaatcgttatcaaaagctaatgcgcaaaattattaaattaggagtaaagacaaaagttttaatgttatctgcaactcctgtgaataccgatttttctgatctacgtaatcaattgatgctagcatctgaaggtgatagtagtaatcttacgaaaactttgactactaaaaaaacagtaacagaaatttttggtcaagctcaacgagcttttaaagattggtcttctttggaaactgaaaatcgcacaacggagtatttacttgacatgttggattttgatttttttgagttattagatagtgtgactatttctcgtagtcgtaaacatatagaaaaatattatgaccaatcggatattgggaaattcccaaaaagatttgctccaattaacgaaagtccgaaattaacagacttagatataacctataatgatctatttcagtttatcgatttgctaaatctggaagtttatacgccgcttaaatatgtatatccctctaaaatagagaagtacacagagcaggcaacagctggagcttcaagttgggcaaatcgagaaaaaggacgcaatcagctgatgattacgaacttactcaaacgagctgaaagttctattcatgcatttaaattaacaagtgaacgaattttagagaatattagtttgaaattacaagttattgaagagtataaacaatcaaaaaatggcattgtaaaaagcgattcagatgattttgaagatgatgtgtttaccgttggacaggacttaaaaattgatatagcagatatggattatcaatcatgggaaaaacaattagtagcggataagtatgtgtttactgaactattggatgttgtaaatcgtattattccggaacacgatacaaagatggcaacacttcaagaaataattcttaaaaagatagagaatccgattaataaaggaaataaaaaggtcataatcttcacggccttttctgatacagcagactatttatataaatatttatctaatcaattaatccaaaaagatggggttcatacagctttgatatcgggaacacgaacagagtcaaccattccaggaagaaaaaacgattttaatgagttgcttactttatttagtcccaaatctaaaaatcgtgatgcattaggtttagatggtgaaattgatgtagtgattgcaacagatgtcattagcgaaggtcaaaatttgcaagatgcagattatctcatcaattacgatatccactggaatcccgttcgtattattcaacgttttggtcgtattgaccgaattggatctaccaatgataacattcaaatggtcaatttttggcctgatattagtcttgatgaatatattaatttaaaagcacgggttgagaaccgagcaaagttagtggctatatcctcaacaggggaggataccatcgataatacagatccagatatggagtatcggaaaaaacaactagaaacgttacagaatgaagtggttgatttagaggatatgtcaagtggagtcaatattatggatttaggtctgaacgagtttcaacttgacctgcaaaaattgagggaaaaatacggagattacgaagcaaaaccttatggaattcatgcgataacaaaggctgatagtaatcatccagcaggtgttatctttgttttaagaaatcggaataatgctatgaatatagacaaacaaaatcgattacatccgttttatttagtctatatcgctgaaaatggtaaaatcatttcgaatcattttaatcctaaaaaaattctagatgatatgaggtatctatccagcgaaaaatctgtaccgattgagaacctagttggttctgttgcaaagttttaaataaagaataaaatcccttacggtatctatgatttaagctgggattcccaataataccttgatttcagtacagaccgaaaacccgaagagagtgccttcttttcgggttttcttatataatcctcgaatggcttccatgcctttaatcgtggtagaggcagtgcgtaaacttcgatagaatttattgcgtctctttactggacgatggtcttgttcaatcaaattattcaggtatttaatggtacgatgttctgtcccttgataaaagccgtattcttttagtttcttaaaggcacttgtaatagagggggctttatctgtgactacaaccttcggttcatcaaactgcttcactaaccgcttaagaaaagcataggctgcttgtgtgtcccgttttttacgtaaccaaatatccaaggttaaaccatctgcatcgatggctcgatacaaataatgccattttcctttaattttgatgtacgtttcatccattttccatgaataaaaggattttttatttttctttttccaaatttgatagagtagtttgccatattcttgcacccaacgataaatcgtcgtatgagaaacgttaatgccacgatcatataagatttcttgaacttcacgatagctaaggttataacgaagatagtagcccacggctacaataatcacatcctgctgaaattgctttcctttaaaatgattcatcgtcattcctcctgctatctttttctattattctaccttatttgatagtagatttaaaactttgcaacagaaccgttttgtctatgtatctccatcctttcgctggaactgatgtctgttttcctgttaatggatgagtaagcggacgatgagaccttttttcaggtttatctggtgctgccatgctaacttctcgatatacatttcctttttcgtcaagtttagaatatgctttttcaccaccgcttaaatctttttttgaatttatccatttacgatattcttcattggcatcacttaaagtgaatttatcattaatttttttaaaaatttctttagacttattcagaataatttcagcattttttttaggccttttgaattccttgaattcagaaaaaatatttatgttttttgcagctgcaacaatatattcatgttgcatagacactccttttgaatctcctttagggttacgcttatcccagacaatggttcctgcaagattattctcaccaaaaatttctgtcaataatagttcaaggttagcaatttcattttcatcaatactaacaaaaataattccactatcagataatagatttcgggctaatttaagacgaggatatatcatagttaaccaatcggaatggtagcgaccatttgatttttcattttttactaatcgatcgccttcttcatctagaattccttctgataagtcattctcttttttcgtttttttgaagttatcctgataaacaaagtccttacctgtgttatatggaggatcgatataaatcatgtctatttttccaagataagattcctgtaaaagctttaatgcttcgagattatctcccgtaataaatagattctcagatccttcaaagttcacactttcttccggttgtgcacgcagtgttttagtcgttggagctgcagcttcaaaataggcttttgctttgccattccacgtaaaatcgtaacgttctttttgttcttctgctttgacaaataaatcacgtaattcattcaacaggtcagtatctacttgacgtgagtgaacatcagataaattaattttttctggtctatcagacatctttattctccccttaatttggctaagttctgttctattgtatatctttctctagccaacgcttgttttttattagtttggatagatcttttaatctgtgtattgattcgatctatttcaaattccaattcattgattatctttatgttagcaacttgttgctttaatggtttagagatatccttaagatctaacaattgacgaataaaattatcacgaacttcatcaatagataatcctttaatttgaagatgattctctactcttttagaaatacagtatccttgatagtacattatgagaatctcatcattgataatgaatagaatctcttgtggtattttagaaacaatctctttaataacacttaaatcaaagtcgatcatatcaacactaaaaatttcaatttcttgtatttttttcgcaggtaaattaatcgtagtaggtcctaatttccctaaccaacgaatacgctcaatttttgtagcatcatcaaagttaaatcgatctttaggaacaatacgattcacaactgcttgttttggaatctctatgatcatctactcacccctaacaactagaaaatcaattaattcaaaatcatttaatccatttatatcattctccaaagctgttgtaccaccagtagtaaagagactatcgatatccttttcctccttaacgctaatcatggagtcaattgcttgattaagtaaattcgaatacttactcatatctttcccctcaagtgtttctatgttaaatgattgaactaggtggttctgttgcaaagttttaaatctactatcaaataaggtagaataatagaaaaagatagcaggaggaatgacgatgaatcattttaaaggaaagcaatttcagcaggatgtgattattgtagccgtgggctactatcttcgttataaccttagctatcgtgaagttcaagaaatcttatatgatcgtggcattaacgtttctcatacgacgatttatcgttgggtgcaagaatatggcaaactactctatcaaatttggaaaaagaaaaataaaaaatccttttattcatggaaaatggatgaaacgtacatcaaaattaaaggaaaatggcattatttgtatcgagccatcgatgcagatggtttaaccttggatatttggttacgtaaaaaacgggacacacaagcagcctatgcttttcttaagcggttagtgaagcagtttgatgaaccgaaggttgtagtcacagataaagccccctctattacaagtgcctttaagaaactaaaagaatacggcttttatcaagggacagaacatcgtaccattaaatacctgaataatttgattgaacaagaccatcgtccagtaaagagacgcaataaattctatcgaagtttacgcactgcctctaccacgattaaaggcatggaagccattcgaggattatataagaaaacccgaaaagaaggcactctcttcgggttttcggtctgtactgaaatcaaggtattattgggaatcccagcttaaatcatagataccgtaagggattttattctttatttaaaactttgcaacagaaccaatcaattcgattaaaagatgacttggagagagcgggaatcgctcgtacttggtgggtagtgaacaatagcatgctttctagcggaacaacgaacccaatgcttttagcaagagcacaaaatgaagaagtttggattgataaggtagcagagctgtctaacaatcattacccagtgattgaatggaaagctgaggatatttcaggagatgctttaagagatattttataatttacgagataactcatattttactcattgacaaaacatagataaagttctatattaaatatagatgaacatctatatggaggtgagaatatggattatttaggattatcaaaaattatgaaggcaattgcagagcctaatagacttcaaatattagatatgatttcaactggtgaaaagtgtgcatgtgatattttggataattttgattttactcagccgacactatcacatcatatgaaggttttaattgaggcgggagtagtaaccgcacgtaaggaaggcaaatggcaatattattctctggtaacagagaatattgaagaatttcaagaattaatacatcagatattgaatataaaacaaaaagaaggagttatgtaaaatgagtaaagtatcgttgtatgaaccagcaatgtgttgtgacacaggagtttgtggtcccggagtagatacagaattgcttcgagtttcctctattattcaaacattggaaaaagtcgatggtgtagaagtagagcgttttaatttaacaggtaatcctgcggcattcgtagaaaatgaaaaagttggggagttgttacagtctaaaggagccgacatactacccgttgttttattagatggtgaaattgtgaaaatggctggttatccttcaaatgaggagtttagtgtctatactggtgttaatttctcagaggataagaaagaagaacaatcaaatagttgctgctctccatcatctggatgttgctaaaacgaagaaacgaaagcctatgagaagagattctcatgggcttttttattaagtgagacagaatctattgacaatagatagatgaacatctatattatgtatagaagaacttctatgtatggagggatgaaagatggattatgaattaacagcaaaagtttttaaagcattaggagacccaaaaagggttcaaattgtggatatgctctcttgtggtgagcgttgtgcatgtgatttattagagcattttgaatttacacaaccaacgctttcccatcacatgaaagtgttaatgaatgcagggattgttcaagccagaaaatcagggacatggcataactattcattgaatgcggagaatatgaaagtattatctggtgtcattcaaacaatcattcaaaacacagatgactgtatttgtcatgtgattgataatgctgcatgttcttgtgaggttaaagggagagtaacagctacaaagaaagcaacaactgcttagaatgatgatgttaaatttaaaggaggaaaccaaacatgaaattgtaccaaccagatcagttaccattaacaaagtatctattttttacaggaaagggaggtgttggtaaaacaacgactgcttgtggcactgctacttatttagcagatagtgggaaaaaagttatgttagtcagtaccgatccagcaagtaatttacaagatgtttttcaaacagaactaacaaataaagggaaagaaattccagaagttccgggattaactgtagcaaattttgatcctgtaacagcagctgatgactataaagaaagtgttgtaggaccatttagagggaaactacctgattctgctttagcgaatatggaggaacaattatctggttcttgtacagtagagattgctgccttcaatgaattttctggttttttaactgatccagaagcagagaaaaagtatgactatattatttttgataccgcaccaacaggtcacacgttaaggatgttacagttaccgtctgcatggagtaattttatggatgaaaatacaacaggagcttcatgcttaggtcaattatctggtttaggtgataaaaaggaaatttatgagcatgctgtagccacattagctgatggagcaaaaacaactttaatgcttgtaacaagaccacaaaaggcaccgcttttagaagcagatcgagcttctaaagaactacaagagataggcattgaaaatcaagttttattagtgaatggcgtcttagaggaagcaacagataaagtatctcaattgatttatgatggacaacaagaagcgttggcacaaatgccagatagtttgaaagcttttcctgagtacagtattcctttacgttcttacaatgtgactggtgttgaaaatctacgccaattgttgaaatccaatcaaggtgaatttttaactgaaatagtcacaccaagagcatttcctagattgaaagacatcgtgaatgagttgcatcaatctggtaaaaaagtgatttttacaatgggtaaaggtggcgttgggaaaacgactattgctgcggcaattgccactggtttagcagataaaggcaagaaagttcatttggctacaaccgatccagctgctcatttacaatttgtgatttctgaatccgatcaaatcaaggtgagtcatatcgatgaggacaaggaattagcagattatacagaagaagtattaagcaaggctcgtgaaacgatgtcaccagatgatgttgcttatgtagaagaagatttacgttcgccttgtacacaagaaatcgctgtattcagagcttttgcagagattgtggatgatgccgattgtgatgtggtagttattgataccgcaccaacaggacatacattactattacttgattctacccaaagctaccataaagaagtagagcggacatctggtgaagtaccagaatcagtgaaacgtctcttacctcgtttgcaagatggaaaagaaaccgaagtggtcatggtcactttacctgaaacaacacctgtttatgaatctatgcgactacaggaagacttggatcgagcaggcattgctcatacatggtgggtcgtgaataacagtatgttaacaagtggtacaacaaatccaatgttactagcccgagcacaaaatgaaaatacatggattgataaagtagcagaattatctaataatcattatggggttgtagaatggcatgcagaagaaatctctggagaagcactacacaatatattgaattagaagcattttattttttttaattgatagatagaaatttttctatctatcatgcacttatttgaattttatgatggaggaagatgatgatggaaaaagaagaacaaaaaggattgggaatatttgaaaaatatttaacgctttgggtggctttgtgtatggttacgggtgttttaattgggaaatatttgccagctatcccagcaactttagggaaattcgagtattatcaagtatctattccaacagcaatcttaatttggttgatgatctatccgatgatgttgaaaatagattttactagtattgtcaatgcagctaaaaaacctaaaggtctgattgtaacctgtacagtgaattggttaattaagccatttacgatgtatgccatttcagcatttttctttttcgttgtatttaaagggattatcccaaatgatttagccaaagaatatgttgcaggagcagtattgttaggtgcggcaccctgtactgcaatggtctttgtttggagttacttaaccaaaggagatccagcttatacattagttcaagttgcgattaatgatttaattattttagtgttgtatgcgccaatcgttgctattttattaggtgttggaaatgtagctgttccaattaatacattgattttgtcgactgttttattcgtagtgattccacttcttttaggtgttgtcactcgaacagtcatcataaaaaataaaggacttcattattttgaaacagtatttctaaaaaaatttgataaggttacgattattgggctgctcttaacgctagtgattattttttcttttcaaggtgaaagaatcttgaataatccactgcacattcttttgattgcaattccgctaaccattcaaacactattgatttttgctattgcgtatacatgggcgcgcttttggaagttgcctcattcgattgctgctccggcaggcatggttggagctagtaatttctttgaattatctgtagcagtagccatctcactatttggtttacagtcaggggcaacattagcaacagtagtgggcgtattagttgaagtaccagtcatgttgctattagttaaagttgcgaatagtacagttggatggtttcaaaaaaatgagttatcttaatcgttaagaagttagtttaagaagactaaatttattacttggagatgttgattgtggcaggtgtaacaaaaaaattatcattattagatcgttatttaaccctctggatttttcttgcaatgggctttggtattggattaggttattttgtaccagaggttgtaacaggaataaataaactggaagttggaacaacttctatacctattgcgataggcttgatattaatgatgtatccaccgttagctaaggtgaaatatgaagagatgtggcgtgtctttaaagattggaaggttttattattatcacttttccaaaactggattgtcggtcccattttaatgtttattttagcggttgtctttttacatgattatcctgagtatatggtggggttaattatgattggtctggctcgttgtattgcaatggtgattgtgtggagtaacttagctcaagcggacaatgagtatacggcaggattagtggcgttcaattccatttttcaaattatcttttattcagtgtttgcctatatttttgtgacagttattccgggatggttaggcttagaaacgcatgctgtttcaattggaatgggtgagattgcaacaagtgttttcatttatttaggtattcctttcattgcaggctttttatctcgttggattctaataaagaaaaaaggaaagaaatggtatgaagaaaaattcattcctaaaattagtccaattacattggttgccttattatttacaattgttgtgatgttctccgttaaaggagaaaaagtcattgaacttccaatggatgtagtaaggattgccattccattactcatttattttgtccttatgttctttgtttcattctttatttctaaacgtatgggaaccagttatccaattgcagcttcattatcgtttaccgcagcgagcaataattttgaattagcaattgcggtagcagttggcgtatttggtattaattcaggggaagcctttgcagcagtaattggtccactagtggaagttccggttttgattggtttagtaaatgtagcattgaaatttaagcaaaaatattttaagcaaacttaaaaaaggaatgaggcatctttatgaaaattgtgattattggttcagtagcagctgggacaagtgtggctgcaaaggctagacgaaatacagaggaagcagagattgttgtctacgaccaagacaaggatatttcctattcaatttgtgggattccttattatataggagaagaagttgaagagttagataagttgacccctagaaatgctgcatggtttaaaaagcgttataatgtagatatttttacagagcatcgagtgacagctattcatcctgaaactcaaacgcttgaggttgagaatcttcaaacaaaggagaagaaaaccgaatcctatgatgaattggttttagcaacaggagccaaaccgattgtgccagagatttttaaagcacagcaagccaatagaaatctttttcatgttcgtactattcaagatgctgctgcaattcactcatttattgaaaaagaaaagccgcaacaagccacaattattggtgcaggctttattggattagaaatggcagagcaattggttcataaaggaatagaggtaactattattcaacgtggcaatcaagtcatgaaacaaatggatgctgatatggcttatcgtgtccaaaaggagcttgaaaaaaatcatgttaagcttcaattgaatacaacgatcacaaaagtaatggagaaggatggctacattactgaattagcaaccaatcaagagcaaacaatcaaatcggatttagtcattcttgcagctggtgttactccgaatacttcacttattcaatcgacaactattcaattgggaaaatctggtgcgattaaagtgaataagaaaatgcagacaacggtaccacatatttatgcggtaggagatgttgctgagagctattctgtcattacagataaaccaatatatcgcccacttggatcaactgctaataagatgggtagaattgctggtgatatcatcacaggaggaacactggaacatcgtggtattttaggaactggtattgttcgagtttttgatttagcggttgcatatactggtttaacagaaaaagaagctaaattagaaggattagagacagctattctttataatattaagccagatcatgcggactacttaggtggaaaagagctgacaatcaaagctttagcagataaaagtagcgggagaattcttggagctcagattattggagagcaaggtgtagataaacgaattgacgtaattgccactgcaatttcatttggtgcagtagcagaagatttgttccatttagaccttgcttatgcaccaccatttgcgacaacgaaagaccccgttctttatactggaatggcgttagataatgcaataagcaatggaacacctttaatgaccccaactgaattgattgagcgacaagcaagtggagaacaactgcaaattattgatactcgttccaaaaaacaatatgaaatttcttgtgttaaaggggctatccatattccattagcagaaatacgtgatagagtggcggagctagataaaaatgtaacaacaatcacgtattgtaataagggcgtaactggaaatgctgctcaaaatatcctgttaaacgaaggatttaaagaagtctataatttatctggaggaaataaaaattaccagataattgcccaaatgctcgcctctaactgatttaatgatgaagggattaaatagatgacagaagaaaaaagagcgttggcaagacttgctggtatcttgggagctttcctcgctgccaaactattaaactatcaaataaatgttggtatatttgtaaattttgttataattgttgtggttctatatgttttagctaaaaaaagagaatctaaagctaaagaagacaaaaaatagtttgtcgcaaatgcagttgcaccttgactgcatttgttttttgacaaaagaaatataagtaaggaggtaatgagtaaataagctatgcactagatttaaaaggcttaaaaaaagtatatgcgaccagtgttgaggcgctgcgtggtattgatttaactgtagaagaaggagatttttacgcactgctaggtccaaacggtgctggaaaatcaacaacaattggaattattacctcacttgttaataagactgctggtcaagtgaaggtttttgattatgatattgataatgatttagagcgagcaaagcaacagattggtcttgtgccgcaggaatttaattttaatccgtttgaaacggttcaacaaattgtagtaaatcaagcaggatattatggtgtctcaagaaaagaggcactgaaacgtagtgaaaagtatttgaagcagtccaatttatgggagaaaagaaacgttcgtgcccgtatgttatctggagggatgaaacgaagacttatgatagctcgagcattaatgcacgagccacgtctgctaattcttgatgaaccaactgctggagtggacattgagcttagaagagaaatgtgggcatttttaaaagagttaaatgaaagtggcacaacaatcattcttacaactcattatttagaagaagcagagatgctttgtcgtaacattggaattatggttctgttgcaaagttttaaatctactatcaaataaggtagaataatagaaaaagatagcaggaggaatgacgatgaatccttttaaaggaaagcaatttcagcaggatgtgattattgtagccgtgggctactatcttcgttataaccttagctatcgtgaagttcaagaaatcggttctgttgcaaagttttaaataaagaataaaatcccttacggtatctatgatttaagctgggattcccaataataccttgatttcagtacagaccgaaaacccgaagagagtgccttcttttcgggttttcttatataatcctcgaatggcttccatgcctttaatcgtggtagaggcagtgcgtaaacttcgatagaatttattgcgtctctttactggacgatggtcttgttcaatcaaattattcaggtatttaatggtacgatgttctgtcccttgataaaagccgtattcttttagtttcttaaaggcacttgtaatagagggggctttatctgtgactacaaccttcggttcatcaaactgcttcactaaccgcttaagaaaagcataggctgcttgtgtgtcccgttttttacgtaaccaaatatccaaggttaaaccatctgcatcgatggctcgatacaaataatgccattttcctttaattttgatgtacgtttcatccattttccatgaataaaaggattttttatttttctttttccaaatttgatagagtagtttgccatattcttgcacccaacgataaatcgtcgtatgagaaacgttaatgccacgatcatataagatttcttgaacttcacgatagctaaggttataacgaagatagtagcccacggctacaataatcacatcctgctgaaattgctttcctttaaaatgattcatcgtcattcctcctgctatctttttctattattctaccttatttgatagtagatttaaaactttgcaacagaaccaaatcttttataaaactgtgttgcacttaatttgataatttaagacaaagaagtgtatacttagttgggtaaataaattctatttacgataaacattgacctttggaggtaatacgaatgaaatacgttatagtaggaacttcgcatgctggttttgaagctgtgcaaactctattgaaaaaagactcagatgcagaaatcgttgtatttgaagctggatcaaccgcttctttcttatcatgtggtattcagtcctatctagaagacatttcaaaatctttggatgaattacactacgcaaatgaagcatcatataaagaacaaggcgttgatatccgcatgaacacaagtgtgattgccatcaacccagagacaaaagaaattacaacacgcactactgacggtgtggaagctacagaaagttacgacaaactattgctttctccaggtggtgtaccaggtacaatcccgaatgtagatgaccaacacgaaaacatcttctacttacgtggtagaaactgggcagataaagtgaaaaatcgtatgtcttcagctaaaaaagctgtagttgttggtgctggttacatcggtatcgaagcagcaattgcttacgcacaagctggcatcgacgtaacagtagtcgactttgttgattcaatcttaccaacttaccttgacagtgaattcactagtcttctaacaaaacatatggaagaaaaaggtatgaagattaaaactggcgaaggtgtgaaagaatttaaagtcaacgaaaacaacgaagtaactgctgttgtcactgacaaaggcacttacgaagcagatacagttattatcagtgttggggttcgtccaaacacacaatggttgaaagacactttaacccttgatggtcgcggctttgttgaagtcaacgaacacatggaaacttcagttaaagatgtttacgctgcaggtgatgcaactgctattccttttgcacctacaaacgacaaagcttacattgctttagcaactaacgctcgtcgccaaggtgtcatcatggctcgtcacgcaagtggtgatgcagacgctaaaattggtcgcgtaaacggtacatcaggtcttgctgtatttgactacaaattcgctactactggtatcaaggatgctaacgcaaactcttaccaaggaaatgtgaaatctgtttacaaagaagacttaatccgtccttcatttatgcatgacgaagaaaaagttttaatgaagcttcattacgatgcagataacggtcgtatattaggtgctcaattaatgtcaacttatgacattcttcaagctattaatgctgtatctgttgcgattgaagctgaatggactgtagaccaattagcgcaagctgatttcttcttccaaccagaattcagccgtccttggaacttcttaaatgtcttagcgcaagaagctcaaggtcaaccatacggcgcagacacaatgcttttctaatccaaacgaaagccactttttcactacagatatataacattctttataacaaataaaagacaggcggtagactctcatttaatctactcgcctgtctttttcttctattatgtagctcacgatatccggttccaaaggtcaaactcttccaacacttcccaaaatacgccaattacttagcagtacttgttcggcttttgctccagcgcgccgagtcttagcgacttttgtcacacctctaatttttactctaaccaaccatcaactatttcacgattggcttcaatccaattatctgctgcttcttctggttctacatctgtcgctaattcttccataacagaagacatatcttcaacttcccagtagaagttatcaataatcttataggcttctggattatcttcctttagcccttctcttgcgtatgaatgaatttcctcgtagccaccaaagacattttctggatcgtcaagcatcttaagatcataatccatgaacatccaatgcggcttccaaccaaccacaactatatcctcttcattattgatagcctgatctaattcagcaatcatagcacctgttgaactcacagaaacctcccaatcggatagattgtcatactccttaacagcattttgggcactgttggtaacacctgcccctggttcaattgctgtaatagttgaatcattttcatccgtgaggtcggtaatcgaattgatatcttccatatatgttggaacagttaatgctgaaatagcaccttctaggttagcccctaaatcaaccatcgagtcaccatatttctctgcataggcctggtgcgttgtaggcacccaaccgccgaccatagcatccaactgcccttctgcaaccgaactaaacatgatggccgggtctactgttgtaatttgtacgttgaaccctgcttcttttagcacctgtgccaggacatttgttgaagctatttcagactcccaattcacagttgctagagtcactgtttggccaccagaatcagcacctacagtcgttttatacgaatcttcactgccaaaggtaaataatagccctataactgttgctactaataaactcattttcttaaacatttttacacgtcccaaaaaatgtttgaattggaaaacaccttatgaaatcttttataaaactgtgttgcacttaatttgacaatttaagccataaaaaatcgtatccataagttaaaacatttgaatactgttgaagcctctcaagagactatttggtttacacttataaatacagtgcatcaagatttcctattctacagattaatttccgaaattgaaataaaaaagattaaaagtataaagagtggtacgctgttcacacaaggagaaccgagatcattaatcgttcatattttatctcgtctgtggtggttagatattatacaacggatgatagtcgcgaaaatccttatgagttaatggagttttttgggaaaaaagatatatctgggaagatgattagtttcttttctagcgtaatgacaaacaataaaaacattcggcttggaattatttctggaataaagaaactatatgatgctgatttaattccttaccatagagagcaatttcgaacttcaataatgtattttaatttaatgggaggtgtcagaatcttagaaatactttcttttgaagaggttgaagagattacaattgagttgttaaaggaaaaaatagtgtcactgaccaagatatccaagttcttcaaaaagcataataaataccctctaaaatgaaatcattttagagggtattctattaatctgattatatattaggctggaaataattatcctgaataattatcctgaataattcatacctctataatttaagctatgaattattcaggtctaacatattgtaatttatatgtacttgttattttaatctccggttattcatagaatcgttatacatgaaggcgtgaatagggagaaaaagcggcatacactgattaaccctatagttttttccagtgtagaatctagtcaggatgcctttaagcaagccgcgcattatttaaatcaggtatacaatttaaaagataccattgtggttacgaacagtgatggcggcagtggctatgaagcagataaatttgaatccatggatggttatagtaagcagcacgagcattttagagacttatttcatgtgcacaaaaagataaaagaacgtttatcctttgataagccaatggccaagcaggtggagaaagctatctatcaatatgattgggatagaattgaaacactttgtgccaccattgaaagtcgtctgattgatcttcccgaagtcattatagaagatcgattggaacagattagaaagctcaaaaattacttatctcggaactgggtttatatcaaaccgtttaagaagcgtgaattatcgattgatagaggcacaggggctggagagacgggtcatcgtctgtatacatatcgcatgaagagacaaggccgaagctggacaaaaaaaggagctagccacgttgtggcaattctcactgcagagaaaaatgggcttttacagacagctttaacagctgaaataacagataaagtcgaatcactaggtgaagagattaaaggagctgtccgtcaagcgttaaagaaaatagattctacggccaaacaatccaaacgggttctatcgtcaattatggtccgaaaagcagctttataggccaactagccctttcatttagttaaatgaatagaaacaaaaaaccgcatttattttaagggtcatttagaataaaggttaccgaggaaaacttgatgcatacaaatgtaagtaaaggcttgaccgattaaatttgatgtgctattatgaaacttactttacaagacaagttgataaaagacgacaacttaatatgaaagctttgattaggggcgtttgagctaatcattgtgatctgaacaggcggtgaacgtaacacgaggttcatgcagctgggctgcaattatttgcggcagcagactatgtattctaagggcatatctgtgggacagttaattctgttctacgggtatgcccttttttaatacagaaaaataagtggaaaaggagggagaccgctctttaagccagttgtctgtgatatgtgatagaataaaaataatgatgaaagaagggaataacatgatcagttatttaataaagagtaggcagggccagtttttagctatcggtattttgtttgccgcagctggctttatatttggaacgatgaatagtgagtacagtcgctggcttttctatgctgctatatttttcttaggcttttatgcgtccaaaaatgcgatcgtagaaacagtgcgctacaagtcgcccaacgtggatctacttatgatcctcgctgcacttggtgctgtgatctttgattttgaatcagaaggagcagccttactactaatttttgccgcagctgaagtactagaagattatgcgaacaacaaatcgacctcagcgatctcggaattgatggctcaggtacctgaaacagctcaagtcttgaaagaaaatggtgaagtggtaaccgttcctactgaagacctgaatgtaggggaaagggtcgtcgtttctaaaggggaacagatcccgatcgacggaatcattgaccgcaaatcgatcgtcaatgaatcagctctcactggcgaatcggttcctgtcgtgaaagaggccgaagatgaagtgttcgcaggaacgatcaatgaaggcgacgttttttatatcgatgtaaccaaatccagcgatgaaacagtcttctccaatatcattcggatggtcgaagaagcgcagagccgtccttcacgcatctctaaattcattgaccggatagagagcaagtatgttatttctgtactagttatcgtgccgattttcatcgttgtgatgtatgcattgatggatctgccattcgaagaagccttttatcgcggtatggtctttctaacagtcgccagtccctgtgccttagtcgcttcggccacgccagcaacgttgagtgcgatcagtaatggagcaaaaaacgggattttattcaaagggggggctgcaatggaagctttgagcacgatggatatcttatacacagacaagacaggcacgctgacttatggtgaattcaaggtcgatgaatacagtgctcccgatgatgtattgaaagaagtgatctatatggaacagcagtcgagtcatccgatcgctcgagctatcgtgacggcgtttaaagagacggatctgagttcagtcgatcataatgaacctgttagtgaaatagccggttccggtatcaagaaaggcacagtaagggtgggaaaaccttcagccttcagtacattcaaaaactacgatcgcttcaagcagtacttccaaaaaggcaacacgatcattctcgcagcaaaagaagaggaggtcgttggttacttttcactcagtgaccagattcgcagacagtcggcagatgccgtggctaacttccagaaagaaggcattaaagtcacgttattaacgggtgataacgaagaagtgacagagacggtagcagaggtcgtcggtgtcgatgactataaagcgtccatgttgccggaagacaagatcgcctatgtcagggagagtcaggataaggaagaagtggtcggcatgatcggtgacgggatcaatgatgcgccagctctggcaaatgcagatatcgggatcgcgatgggcagcggttcctctgtggcgatggaatcatccgatgtcgttgtcgttaaaaatgacttgtcgaaactgttctacagttacaagttgagtaagaaactgaacaaaatcattttgcagaatgtgattttctcgatcagcgtgatcgtgaccttgatcgtcttgaacctctttggcgtattaggacttccactagcggtattattccatgaagggtcaacaatactcgttattcttaatggtctccgtctacttggatctaaaggtccgaagcaagaagagagagtctcggatccatctttaaagtctgtaaaggtttaaactgaacattttatgaaagaaagcccctgagactgatcaaacagacttgggggctttctagtgttggttctgttgcgaagtttgaaaatcaaacgcgccctctctgaactccaaatatcttaggctgttattcccattaataccttgatttcagtagacaccgaaaagccgaagagcgttccatttcttcggttctttttatatattcctcgaatggtctccatgcccttaatcgtggaagaggctgtacggagactttgataaaatttatttcgtcgtttaataggtcgatggtcttgttctattaaattgttaagatacttcacagttcggtgctctgtcttagtatataaacccacactctgtaactttctaaaggcggagccaagagaaggtgctttatcggtcacaattgctttcggctcaccaaactgtttatggagtcgttttaagaaagcataggctgcttgcgtatcccgtttctttcgtaaccagatatctaaggttaagccgtccgcatcaattgcacgataaagataatgccaacgtcccttaattttgatataggtttcgtccattttccatgaatagaaggattgtctatttttcttcttccaaagataatagaggactttgctgtactcttgcacccaacgataaatcgtagtatgacaaacatttattccacgatcatataacaattcctgaacttcacgatagcttagattgtaacgcaggtagtaaccaacagcgacaataatgacgtcttttttgaattgtttgcctttaaaatgattcattactctgtcctctctgtcttttttctcaattttacactaaaatagattttttggaaaactttgcaacagaaccaaaaaagtagttcaaattatccctaaaataaaaagcatttctaaagacggcgaaaaatatttatatgaatttaaaccagatcatatttatcaaaaactaagtacattaaatgaaagagagcttgaatctctagaacatgtattaggtttagaattttaatttgcttatttttaatggccaatagagtatactcttttgaccaatttgtttatgcgccacaacgaataaaaaataatgagcaataaagttgggcaatagtaactttattggagacacatatccattttaaaaatgatttagtgatttagtcactaaaattagtttaaaaggataacaatgataattagtaaggataataatctaattttaaccaaaaaccatatataggcagttctttgtattagctatcaaaataaagtttccgaaatacgctttttaactatatattttaaaaagttttcaaaggatataatttcccttttctgagtttagttgtatattttagggggtgaagagttcggaaatgttagctcgctagtagtggacatagctaaaactgtcaaaaatattcaaataatgaaagatagagcccccctaacgcgtccgaattaaaggctgaagtggtatattgttaatttgcaagctatctttaatgttaaagtaatagctatcggataaaaaattattatatcagttatgactgtgactaatatgagaggtcaaaaaattaaacggtaaccatttgatgctctgcctattaaggaaaagtaaaacagtaatgaatttatgtatcagtcagttaatcggcaaaaataggaaaaatatcaatatgttgagtatacctatattttattataagcaataacttcatgaaatatctttatactaaattaatgctatacagtaaaatcataatactattttgattaattacattatataataaaagggaatccgaaaggaatgggctatatgcatataaatggtcacgaaaataacgatatttttaataaacgacgcggtaaacttagaatttactttggctatgcggcaggcgttggcaaaacgtttgctatgctaaacgatgcacaagagctagttaaaaccggagttgaccttgttgtcggctacgtagagcctcatgctcgtccagaaactatgaaacttttaaatggtctggaaaaaatccccactaaacctattttatataaaggtgtaaaactatacgaattcgatttagattcagcacttaagagaaatcctaagttaattattgtagatgagttagcgcacacaaatgcgtatgcttgtagacataaaaagagataccaggatattgaagaattactacaggcagggatagatgtttttactactgttaatgtacaacatatagaaagtctaaatgatattgtggaatcaataacaaacattcatgtacttgagcgtatacccgatgcagtttttgatggggcagatgaaatagaattagtagatattgaaccacaagatttactagatagattaaataaaggcaaaatttatagggaaaagcaggctagacaggcagtactcaatttctttaccaccgataaattaattgccttacgagaaatagcattacgaagaacagctgatcaagtgaagagaattgccgagagtaatatagttaaccctaaaaataattatggaaaagagcatattctagtttgcatttcaccatctcaaggtaatgagaaagtgataagaacagctgctcggatggctgaagccttaaaggggaaattaacagcagtttttgtggaaacacctgaatatgaggaatcttcaatcaaagagcaagaatctttgagaaaaaatttacgacttgcagagcagcttggtgcccaaatatcatcagtttatggagaggatatttctcaacaattggctgaatacgcaaatgttagtcaagcaactaagattattcttgggagatcctcgaaacgaaaaagttggctcaagcctaagttagtcgataaactttctgaacaaatagatagtacagatatttatattattcctgatacgcagcctagcaagacaaaaaaacatttcaaaataaaaaacgaaatgtctttttcggtttcggattctattagaacagtcatcattttattattttgtacaattatcggtattatattcgattacaatcattttagtgtcgtcaatattatcattgtatatatcctaggagttcaagtaaatgcggtaattacaaaggggagagtctatagtattgtatcggctcttttaagtgtgctgatttttaattatttcttcacggagccgcgatatacattgcatgcaattgatcctggatacccggttacttttgttatcatgctcgctgcagcaattattactagtacattaactaaaagaattaaagagcaggcaaggcaagcgtcccaacgagcatatcgaacagagatcttacttgaaacaagccaaaagttacagaaagctagtactgaatcagctcttttaagagaaatcgctatacagataaataagctactagaaaaacctataattatttacccagtaagagtaaataaattagataaacctctaatatttaatgaagataaacgtgataataacgaatcagagtggataagcaaagaggaacgtactgtggcagaatgggtattgaaaaaccaaaaacgagctggagttacaagtaatacctttactaatacaaaatgcttatacttagctgtaagaggaaatggggaagtattggccgtgatcggaattgtcatggacaaagaggcgcctatggataatttcgaaaaaagcatcttaattgctgtactagccgagagcgctctggcattggaaaaagaaaaatttcgggttcaagagcaaattatctcattaagaatgcagcaagagcaggtgcggacgaatttattacgagcaatatcacatgatttgaggacgccattgacaagtatttcaggcaacgcaggtgttctaaaagcaaatagtcatatcttagaagaaaagcaaaagcaaaacttatataacgatatttatgacgactcaatctggttaataaatttagttgaaaatttattgtctattactcgtcttgatgagggtagttcgaatatcaatatgcaaccagatttaatagatgaggtaatttcggaagcacttaggcatatagataggaaaagcatcgaatataatattagtatggagattcaagatgaggatcttattgtaaatattgattctcaattaattatgcaagtaattatcaatattgtggacaatgctatcaagtatacgccaccaggatcgaaaatttgtatcgtagcaaaacaagatatggattcagtttgcgttgaaattaaagataatggagagggtattccagataaagagaaagataaaatttttgatatgttttatacggctaataacattaatgcagatggacggagaggactaggtttgggactttatctttgtatgtctatcattcaagcacatcaaggtgaaatgtatgtcaaagataatattcccaaaggtgctatctttggattggttttaccgattgaggaggtggatttaaatgaataaaaatgcaagtatactagttgtggaagacgataaagcaatcagaaaattaattacaactacgcttgaaacccgaaattataatttttatacggcggatacaggtaacgctgcattaattcaagtaacaagtagacaaccagatattattattctcgatttagggctaccagacatggacggtacaactattatccagcgagtaagagaatggtcgcaagttcccattattgtcgtaagcgcacgaagcgaagatagcgataaaatagttgcgttagacatgggggcagacgacttcttaacaaaaccatttagtgtggaggaattgttggcccggattcgtgtaagtttaaggcgtagagcttatacaaattccgaattgagtactcaaaatgtctttattaatggagatcttaaaattaattatactttacgcgctgtttatttagcggaaatagagatacatttgactcccattgaatataaattagtaagcttattagcgaaaaacgttggaagggtcctgactcataattacattacacaccagatatggggggactattcgaatgatatcccagcattacgtgtatttatggctaatttacgaaaaaagattgagaaaaaatcggctcaacagcgttacattcaaacccatgttggcataggctatcgaatgctacaggtttctgacaataaggaaaatgagacgatctagtttcttaatgcaaaattaatctggttctagaaacctttatactaccctaataccataagtgatacacttatcaagaattatttgattgagaggtggacgcttatggatttttttatgctcggaatactgattttcagttatttcatgttgaaaatgattgtgcactggtgtgattcgcaaattaagcagcgataagaaagggtgtaaaaattgattattttaggactattagtgtttttgattggtggatatctattctatgcgttaatccatccagagaaattttagggagaggggagttttaataatgctacaaatcagtttatttttaatcattgctgcacttttagtacttccaatggggaaatatctttatcacattgctacagagcagcatacttttgctgataaattattagatcctgtagataatttcatttataaattgtgcggtattgataataaagaaatgggatggaaaaagtacacactatcgatgttactcacaaatgccgtcatggtattagtaggttattttatattacgaattcaatcactgcctattcttaatcctaatcatatagcaggaatggagccatctttagcatttaatacaatcataagtttcatgacaaatacaaatttacaacattatgctggggaatctgggctgtcctatttaagccagttactagtgattacctttatgatgtttacttccgcagctacaggattttcggtagcgatggcttttattagaggattagcaggaaaaaataaaacaatgggtaatttctatcgagaccttattagaataattactcgtgtattattaccattatcgttaattggcggtttattacttatttcacaaggagttcctcagaatttactgtcaaatataactgttcaaaccatagaagggaagtttcaagatattgctatgggacctgtagcttcactagagatcattaaacatctaggtacaaatgggggaggtttttttggagcaaattctacaactccttttgaaaatccaaatattatttcaaatatgatcgaaatgctatccatgatattgttgcctgcctctgttgtaatcgcttttggttatatggttcgcgatcggaagaaaagagtgagcaaaagcaagaaacaaaatcttttttggataggaaatgaagcaaaaccattactttccgtaatgatcattctttttcttatgggtttaattgtgtgtgtaatagctgaaaagggaggaaacccactgctcgaaaaagttggcttgagtcaagctatgggaaacatggaaggaaaagaattgcgatttgggatagatcaatctgccctcttcacaagtgttacaacagcttttacaaccggttcagtaaacaatatgcatgatagtctttccccattaggaggaatggttgccctatttaacatgatgcttaatttagtgtttggtggaaaaggagtaggggttatgaacatcatcctctatgttattatgacagttttcatctgtggtttaatgattgggaaaacacctgaatatttagggaaaaaagtagaaggaaaagagatgaaacttgcagcattaggcatcatcattcatccatttttaattctaagttttactgcaatagcagtgagttgtacggcgggtttatctggcatttcaaacccaggatatcatgggctgacacaaatattatatgagtttacttcttcatccgcaaataatggttctggatttgaaggattagcggacaactcacacttttggaatatcactacggggcttgtcatgttttttggccgatatttgacaataattattcagcttgctattgctggttcgctcttgataaagagtcaagttaatgaatcgatagggacattaagaacagacacaaagactttttcgatgtcactatttatgattattatgttaattgctgcgcttacgtttttcccagcattaatattaggtccgattgctgaacatttgtctttatggagttaaggaggagataaacttggaaaagaaagcaaaacctggtttttgggataaaaaaatattaggtactgctgtaaaaggcgcatttataaagttgaatcctgtatatatggtgaaaaatcctgttatgtttgtcgttgagattggagcgataatttctttagcgttatgtttcttcccaaatttatttgggggcaataatcaggatatgattctatataatagtttagttttcatcattcttttattaacacttttatttgcgaatttttccgaatctgtcgcagaaggaaggggaaaagcgcaagctgctagtttaaaacaaacacaacaagacatgcaggcacgccttattttaaatggaaaagaaaaagtagtgaatgctaacacattaaaaaaaggagacattgttcttgtgaatatgggggaagttattccaagtgacggagaaattatcgaaggagtggcatctgttgatgaatccgcaattacgggagaatctgccccagtcttgaaagagagtggtggagattttgcctctgtaactggaggaacgaccgtggccagcgactacttaaaaatacaaattacttcaaatcctggtgaatcatttattgataaaatgattcaattagtcgagggggcttctcgaaagaaaacaccaaatgaaattgctttaagcacgttgcttgtaagtctgactattattttcttgattgttattgtctctttataccctatggcgatttatacaggtataaagcttcctgtatctactttagtcgctctaacagtatgcttgattccaacaacaatcgggggactgctatcagcaataggaattgcaggaatggatcgggtgactcgatttaatgtcattgcgctgtcgggtaaagcagtagaagcttgcggagacgtagacaccatgatattagataaaacaggaaccattacctatggtaatcgaatggcttcagagtttattgctttagataagggaaataagaattatttgatccattatgcgatacttgcgtccattcaagataatactccagaagggaaatcaatcgttaccttagggaaggatctattaaaagaagacttggatacaaatgatataagggaaaatcaatttattgagtttacagcacaaactcgaatgagtggcgttgatttagccgatggaacaagaattagaaaaggtgcttacgatgcaattataaaatatattaaaaacataggcggagaaattccacatgaccttgaagacaaagtaaataacatctcaaagttagggggtacacctctagtagtatgtgcagaggaaaaaatttatggtgtcatttatttaaaagatacaattaaacctggtttagtagaacgatttgagaggctacgttcaattggtataaaaacaattatgtgtacaggggataacccactaactgcagcaacaattgcccatgaagcaggagtagacagctttatcgccgaatgtaaaccagaagataaaatcaaagtaattaaagacgcacaaagtaagtcaaaggttgttgctatgacaggagatgggaccaatgatgctccagctcttgcccaagctgatgttgggatcgcaatgaatagtgggacaaccgctgcaaaagaagctgccaacatggttgacttagactcggatccaactaaaattttggacgttgtagaaataggaaaacaattactaattacaagaggtgcgttaacaacgtttagcattgctaatgacatagctaaatattttgcaattattccagcaatgttcttagctattattccacaaatgcaagttttgaatatcatgcatttgtcctcttcttacagtgcgattctgtcagcgttgattttcaacgcaataattattccttgtttgattccacttgctatgaagggcgtaaagtacaagttacaacgatcagaaaaaatgcttgctcataatatgttggtctatggagttggagggatgatcgttccatttattgggattaaattaatcgacttagttattgcaccgttattgacaatgatgggattaggctgaaaataaactatagccgagtatcgaaggagtctttgaagtggagagctttttggcaaatgttgggatgtttgttattgcactaagcactatccttggatataggatacttatattcttctatgatatagaataccgcattgttcgttttaataaaaaactttaccaagttgcagaagcttttgctgatggtatggattccgaagaagtcgaagcaaatttaattaataaagtaggaatagatcaagaaagtgctaaaagtattgttaagaagagtttaaaataccgaaaaaagaaacaagcttataaaaattttatcaaaataacaaacaaagtattaggtatacgtatctatgatccaaaatataaaagtgattaaatagaggaggatctttaataaaatggaaaaaattttttatttcattcggaagccgatagcaataacacttgtattagtcgtgatttgtggattaatatatcccctagttctaatgggtgtaagtaaagtggtttttccagaacaagcaaatggaagcttagtacgtataaatgacagcgtagttggctccaaattgattggtcaatcattcagtggcgaaggatttttgcacagtagaccatcagcggtcaactataacacatatacagtgcaagagaaaaaagattataaatataatggtgtagcatcgggttctagtaattacgctatgacaaatccagatttaacaaaaagaacaaacaaagatataaaaacgtttttaagggaaaatccgactatcaaaaaaaatgagattcctacagatttggtaactagctcaggttcaggtcttgatcctcatattagtccacaagcagctgccattcagataccctctgtttcaaaaaaaacaggtatttcagaaaagaaattgaaaaaaatagtaagagatagcactgaggaaaagtttataggcatatttggagaaagaacggttaatgttttagaggtcaatgtagatattgtaaaagcaaaaaaactcggtaaatttggttcaaagtaattttgtatgtaaacctaaataaaatcactataaaaaagtttaggaattataatttctagacttttttggtagctatgaaagaatatagtttgagaaattaaaataactattaatttttgccttaaaaaagtctgtaacaaaaagttgtggggagaataaaactaagggtgtaggatcaaacgagttaaacaaaggaccgaatgcgggaatggatataataaatatagtggggctaattatcgcctctatattagctttcacgctaccagtcattggattagttcctagcatttatttacttgtgaagcggagaaactatccgactagtataaaaattatcgctatcacagcaattgtttatcaagctataatgattatctttgtattattgggattctatttttttacagtaagtacttccacgaatcacatagagatttctgacgtgacctcaaaagttcaaaaataaagtaaacaaaaaaccagtatagaaaagggagtaaaccatactggaaaaaagggatttgatcaatcatcattaaaagggagaacgattgattgatgttatgaaatatatgatagtctctttcgctaaaagtaagctgaaaaatttctaaaaaattcatgagaaatagtttgtttgaaaccagaaaagtaaaattaaaaatataacaccttggataattattagttatctgaggtatttatttgttgagatatcgataaatcgttgttctagaaacattccagcgtgcagcaattgttttaatgggagttccattatcaatgagagttcgcattaaagctagatcttctgctgttagtttttccggccggccaccaaatcgacctctagcccgagcagcttccctacctgctgcagaacgctctaaaatcaggttacgttcaaactctgcgaaagcagcgaacaaatgaaagataagctgcccagtggaacttgatttattcatcgtgatgttttcttgcaagctatgaaaactaattccattattatttaattgatttactacgcgaatcagatcttccatgtttcttccaagacgatccaagcgccaaaccacgatcgtgtctccggatcgacaaaaatcgatcgcagcttccaatccagggcgtttactttttgcgccactaatatgatcatgaaaaattttctcacagccatgtttttctaaactatctacttgaagatctaaattttgcaaaccagtcgatacacgtgcatatccaattttcaaatattttcacatcctaaatttattctctgcttttatagtaacataacttattgggcatagatataatggacatagatttatttacgggtttatgaacacgaaatgatttgaaatagtagatgtgactttaaccgataattttcactattttatatagctataattcatgattgtttatagccgaagccaacttcttgtaagtataaaggtagttggcttctagccaaatattattcagtaaatccaataattagggactctctagcagcttgaactacatctgaagatatcttctcaagattattgatttccattattctatcaatttgagtaaataagcgttggagtaatcggaaattgccattagttagcttaataatgcgattaatagcatcataatcttcaaaattttcataatcaattgctagacctatatcttggcatctatattctaatatatgctttatttctgaagaacttaactttttaaactcatgtgcaaatccaattctagagtataattgaggatatttagatagtcttttttcaattccttgcattcctataaagaccataccgacatcattttgatcataaatgtctcttagaagatccaacgtttggatcttcaaacgatctatttcatcaataattattaaatcaaccgcataaaatatattttccacgattcgatctatactagttgccatgtaatctattctatcagttttagggattactttattttctgtacttgaaattatctcatttacgtgtgctatatctattgcaagactgcttaattgagaactcaatgaactgggtttagtggcaggtgctgtcacaaatagagtattggtttttatcccttttaacttatctatgactaattccggattgagtctattaccttttctagttaaaatagtttctaatctatgccagtttgcataatgctttgctgaaatggtcttcccgacacctggattgccataacatatgccaatatatttatatttcatgcatgctctacaaaattcggcaaatttcttgtattctttagtttcaataaagttgagttcattcattttcatacctcctcaaacttgatacattatttttaacagtactactattctctttttgtctcccaaccaatttttctatcactttattagtggagacgattagttccctttttaactctcttttcagtttgctcctttctttttctatttctctaattccgatagcgtattgttcaaaagatgtagacactgcggtacaaaggaatacatttttataaaagactctaacatcactaatatctctaggatcatatctaatcaccacaggttcactaacaaaagctgaaagagttgggtggacatacttcatcccaaataagtgaataccgtcagagtgtaccacccgttctttcttaacttttattaaaagaagatctaaatcctccaaagagtttggcatattcggtagaaaatcatagttattccacatagctataggtttttctttagttgtactatgctgtttttgatggtatattcttaacaaccaatttctgaaaatatcggaaaactcctccaatgttagcattgactttgctttccgattcttaatataacctggaagatcttgtagtaacatagaatttacagtatgaaaaaaccgttcgattttccctctacctctaggcaccccaaccttagaaaactttaattctattttcaaatcagcagagacctgttcaagatgttgagaagtaaaatcgctaccgtgatctgtataaaaaattctagggataccacaaataggccagtcagcctgatcttttctccatattgcttgtcttagagttagagctgttcgtagtgagtttggtgattcaaacgcaataaagtacccagtaattgctcgactgtagtcatccattattattgttagccaaggcctttcaggataacctttcgcattcaatacctcaatgtctaataatgtatgatcagcttgccatatgatattgggagctgtagtttccctaatatgaactaattcgtaatgattcatatatattttagatccctgatgcgctagtactttcaatttatcgggaactaattgaataattttccttacctgatagtaagaaggctcctgaatattattttctttacaccaagacacagttctcctataaatggaagttatagaaacatttttattttctaagtaaatgtgtttaatgattttacaaaggtcttcagaaattttcattgaatttttatccgacctttcttttgtaattaatcccaccaatcccgattttttataattcgaaatccactttctaagtgtacgtgttgaaatatcattttcttcacttactttggaaagtggaatttctttttttaagtatggctgaagtacccgaaatttttttaatgcttttaatctctgctcctctgagtaattagctaaaatttttttattactcatttcctcacctcctgatatgaacaaattatttcatatatcagattatatgtctaattagggtctaccctaattagacatataaaacagattgaaaacaaacgatttttagtgtatgtttagggtgtgtgataaacagtcagaaaataggaagtgggaaaatgaaaattgcttatgctcgtgtttcaactttagaacaaaatttaacacgacaaatcgaaacactcaaaagttttggtgctgaaaaaatttttacggaacaaaagtcaggagcttctattaaaaatagaaaagcatttcaagaagctttgcaatttgttcgaagtggtgacacttttatggtagaagcgattgatcgattgggtcgtaattatgatgaaatcatccaaaccgtttattttctaaaagaaaaagaggtcaaactggttattacgagtctgcctattatggctgaagcaataggaaatccattattggataagtttattaaagacttgattatccagatattagccatgattgccgagcaagaacgagcagagagtaagagacggcaggcacaaggcattcacagtgccaagcaaaaaggaatttacaaaggaagacctattctatattcgcctacttcaaaagatccacagaaacgagttatctatcagagagtcattgacatgttaagtaaaggagagtctatttcaaaaatagctgaagaaagtggtattacaagacaaaccgtatatcgaattaaaaattcgaactaataaactaaaaggatctcttcagccaataaaaagtagcccttttgatctaacagcaaaagggctacttatattattatacgttattatatttagatgaaaattatcaataaaaagcggtgaaatttattaatggaagtcacacgaaatttaataggaaaagaagagtgttcagaaaatgaccattttatgaacattcaaacattcacttgaatatagatggatgttctgatataatacattcaaacaaacatttgaatgtaaaggaatgatcgtatgaataatgaaatttgtgaaataacttgtattcatgaagacaaagttaatcgtgctaaatctaaactagcaaactttgatactccgtcagtaagtggtttctttaaaatattgtcagatgaaaatcgacttaaaattgtacatgctttagttcatgaagatgagctatgtgtttgtgatattgctaatatcattgatgcttcggtcgcaacaacttcacaccatctgaactccttaaaaaaattgggagtagttgatagtcacaaggatggtaagttagtctactattttattaaaaatatcaaaatcttaaatcttatggagcttggcgtaaattttaaagaagaggtgctagcatgagtgagaaaatgaccgaaaaaacctatcgaatagaaggattaagctgtacaaattgtgcaggtaaatttgaaaaaaatgtaaagcagttgccaggagttacgagtgcaacagtaaactttggtgcaagtaggatttcagtagaaggccaaacaacaattgaagaactcgaagaagcgggagccttcgaaaatcttatcattcgtgatgatcaagaaaatgatgaacaagttagatcaaaagagtcttttattaaacggaatatcgctttaatcatctctcttggttttatacttgttgctgtgatttcccaactatcattgggcgaagatcatttattaacgaaagctctttatatattggcaataataattggtggatttgatttatttaaagaagggttctctgatttgatcaaattggacttctccatggaatctttaatgactattgcaattattggggccgcatttattggagaatgggccgaaggttctattgtagtaatactatttgctattagcgaagctttggaacgattttcaatggataaagcaagacagtcgattcgttctcttatggatatagctcccaaagaagctcttatcaggagaaacaatgtagagcaattagtcagtgtcgataaaatcgatatcgacgatattatgatcattaaacccggacaaaaaatagccatggatgggcttgttatcaacggtcattcttcagtaaatcaagcagcaataacaggagaatcggttcctgttgaaaaacagttagatgatgaagtgtttgcaggaacactaaatgaagaaggtgttcttgaagtcaaagtaacaaaaaaagtaacggatacaacgattgccaaaatcattcacttagttgaagaagcgcaaggagaacgagctcctgcacaagcctttgtagataaatttgcaaaatactatacgccattcataattattatggcccttttgatagtggttgttcctccgctattctttggtggtgactggaataaatggctttaccaagggttatccattttagttgtcggatgtccttgttcattagtgatctcaacacctgtttcaattgtttcggctattggtaatgcagcaaaaaatggtgttttagtaaaaggtggagtctatctggaagaaattggtcatttgagagcaattgctttcgataagactggaaccttaacaaaaggaaagcctgtcgtaacggatttcattgcaaccagttctgaaactgatataaattatctatcgattatttcatcgttggaatctctttctcaacacccattagcttctgctattttaaacgaagcggataaaactaatgtggattacaagtcaatacaaatcgaggatttccaatctatcacaggtaaaggacttacaggtatacatcaaaacatacgttactatattggaagccctaaactgttttctgcatcagtaatcgaagaaacagcggtcaaagtacaatacagacaatttcaagaacaagggaaaaccgccatgtatttcggtactgacgaacaaattttaggagtaattgctgtcgcggatgaagtaagagattcaagtgctgccgttatttctgaactccacaagttgtcaattgaacacactattatgcttactggtgataatactaaaaccgctgaatctattggtaagcaattaggtgtgactgaaataaaaggagatctaatgcctcaagaaaaattagattcgattaaagcgttgcggacaacttataataaagtagcaatggtgggcgacggcattaatgatgcaccagcattagctgcatcgacggttggtattgcaatgggcggtgcaggaacagatacggctctcgaaactgctgatgttgctctaatgggcgacgatttacaaaaattaccattcattgttagacttagccgtcaaactctaaaagtaattaagcaaaatatcaccttctcattaggtataaaactattagctctactactagtcataccaggttggctaacactatggattgctattgtagcagatatgggagcaacgcttttagtaacattaaacggattacgattgatgaaagttaaataacacaacaaataaaagaaggcatgtttataagcgtgccttctttttatgatactttttagtttttttgaacgctagttatgaagcaaactatgcgccatttaaatattaaaatgacagtctaaccttattaagtaggtgttcccattaatactttgatttccttagataatagaaagctccagagaaataaaataagatcttcaaattataaatttcatctctttaaaaattattattttgaatttttaaagagagcttttatgagcaccaccattataaaagctaaaaacaaagctactacaccaacgacaacaaaagaagtataatcagcatagctatcatcactaaacatttgaagagtaaaaacgataaatgctgcaataaagctaattaaaaattgaagccatatctggtggatatatttttggaggagaaaaatatatccatacatgcctattaaaagtaaagtaaaatctatattttgaagtataggatttccttggatgatatttataattagagtggtaaatgtgactactaaaacaataaatatcatcctaaaaacaggtttatttatattttttttaaacaaactaatgtaattttttaacataatgatcatccctctttttaaataaaaaatattatccaaaatctatttggtctaacatattctctcgactggcttgatctaatccaagatacgttaaggtcatagcttcacttgaatggtttaataaatgcatcactaaaccaatattatagtttgactgcgtatagacccgataagcgcctgttttacgcatggtatgcgttcctagatagttaattcctaaaagatcaccaactcgtgccataatcttataaaactgtttctcggtaataggacgatcaggacgagaagttgaaggaaataaccactctgaattcatattttgttggatgagccatgcatgataaagcattaaatcttgttggacaggtttcaaatataacgtatttttcttacctgttttttgatcatgaataaatgcagtttgtttgactgttccatcaagattaaagacatctgttttttttaatttcatgacgtcactcacacgtagcaaggtcgctttcccaacttggaaaattgggttctgttgcaaagttttatttaactgattatttagtgtagaatggaagaaactacacgaggagaataacaatgtcccattttaaaggtaaacaattcaaacaggatatcatcatggtagccgtgggctactacttaagatacaatttgagctatcgtgatgtttcagaaatccttaatgagcgtggaatcaaggtttgtcacacaactgtttatcgatgggtacaagaatatggttcgattatttattgcctatggaagaaaagaaataagtctgctagcgattcttggagaatggatgaaacatatattaaagtaaaaggaaaatggcattatttgtatcgtgccatcgattctacaggtttgacattagatatttggtttcgaaagaatcgggataaacaggcggcctatgctttctttaaacgattaatcaagcaatttggagaacctagagtttttgtaacggacaaagctccttcgctaagcagtgcgttcaatcgacttaaatctgaaggtttattttctaacactgaacatcgaacgagtaaatatttgaataatatcattgaacaagatcataggcctatcaagaaaaggcacaaattatatcagtccataaggactgcctcatccacaatcaaaggaattgaaactatacatgctttatacaaaactagccaaagagacttttctctctttggcttttcagtgattcatgaaataaataatctaatgggtgttccagcttaaaattagaaaatagttgagatatcattttacttctttgaactttgcaacagaaccataaaagataatttatatcactatttttggattcgtcttggttttgctagtgacggccgtgtttagtcaagtatcttaaacttggagaaattgacttatgaatccggttgcaatgtgatagagaaggatgaacacaataaaaaaggatataatagggaggataaaatgaaaaagagaatgtattgtttagtgatgcttcttgcgttcgtgttgttggttagtttatcaaatcaacaagtagcagcatcagaaacgggaaatgatgataaagaaattcaaacattgtatcaaaaagcgattaatgaaaagaaagtagatcctaataagtatacctttgaggcctttcaagaaaattacaacttgggaaaaatggattattatgcgatgaaagatattatcggatcaggactagattataataattggtttggagagattatgaattatggtgcttttccggacggtgaaggccattctccttcagaagctaagtcaaataacatgttgcgtagtcaaacatcaaatggcaataaattagaaaaggcgattaaaaaaggtgatatattgattgttaaaagtagctcctttggacatgcggcaattgctactagtaacaagtatattttagaaatgagtggtggaggaaatccttcgaaatgggcaactacggggattaaaaataataatcaccaattgaataagcataaatggatttttggaggtaaggaacaggattatataaaaaaaccgactatcaattattggatacaactatggcgtgttcctcaatcgagtattgctaataaagccgctagctatgcagacaagacctattggaatagtaaccataaatacgaaaagaataaacatattacctataatttaagatcggggactctaacaagaaaccccaattattgttcaaagatggtatatcaagcatattactatggaacaggtaatgcaaatgttattgaaacagcaacaactggaatgacattcgtttccccagcagctattccaaatacatttactggaaaatatgctcctaaaaaggttggaacatattgaaaaaagaggtgaagatatcttatgaaaaaaatcattattggggtgcttgtcgttatagtactaattatagctgtagttgaaggaaagtactatatcaatatgtactaccaaaagggacaagctaaaaaacctatagaagcttctatcaaggcttcaaaaattcctaaaaaggacatttatgtgataaaggaaaatgagtatgaatctgaatctataggtgatagtgttcaaaaggaaatcactacaaagaaagattacgaaaattggaagcaacttgtgagcaagagaaaaaaatacttagatggaagttcatggcataagaagaaggggtgggataaaatagataaatgtgaaatatcttatctatttgtctatgatactcatactaaaaaagtacgaaagtattatatccttgcaggaaattcagttgatgacaaaaagaataaacaatattttagttatcgtttaaattaattagtaaataaattttttattatgtgttcattcgcaagcttcagtttttggctggagcttttttattatttaataaaatttaaacttgccaaacagaacatttgtttgtataatttagtacataaatagaacatttgttcttgttggaggaggtcatttcaatggcttatcgagatcgaggcatgcaaaagtggcaaggcatgattctatccgagcatacagaacaactagaacaagcaaaaagaaagttatcttggctaccgcagcaaagtgaagaatgcctggtagaaattttaagctacgctgttacaaagcagcatgctataacgatacaacgacttacagaagatgaaaatggttatcccctaccctttgtagtcggtagaatcgttggtgtggaagacgatcgtatttatatgagagatatggccggagagatcactgtgttgacatttgacgatatcaatcatatttcagaagggacaatcgaaaaatggtacaggtagaagattacacccacgtcccctctcgcgatattctttgtgtcgatgtgaagtcgttttttgccagtgtggagtgcgttaaacgtggattagatccactacaggcttttcttgtcgtcatgagtaatgcagatcgcgctggaggattggtgcttgcagcaagtcctcaaatgaaaaaagttttccgaattaagacaggatctagaaaatttgaagtgccagaggacgatcctcgcatcattattgctccacctagaatgcaactatacttaaaagtgaatgagctcatccagaaaatcttccttcgatatgtatccagggaagattttcatgtctattctatcgacgaagcctttttggatgtcacgcacagtaaaaagctttttggatccgctgaagtcatcgcaaaaaagatacaagcagatattttaaaggagttaaagctgtatgtcacggttggtattggagacaatccccttcttgcaaaattagcattggataacgaagccaaacatcaaaaatctggtattgcggaatggcgatataaagatgtaccggaaacagtgtggaagatccgaccgatcactgatttttggggaattggaaaaaggactgcttttcagctggagcgaatggggatctatagcatccatggattgagccagatgctcccctcctacttaaaaagacgtttaggtgtgattggggaacaattgtattatcatgcgcatgggatcgattatagccgtttatcagagaagtataagccaatcgaaaagtcttatggtaaaagccaaatcctcgaaaaagattatcatgatccgaatcagatcgcgatcattatccaagaaatggtggaagaagtagcaatgcgcctgcgtaatcatcacgtcgataccagtgtcattcatttaagctgcggttacagccgatattccactaaaaacggttttagccaccaaaaaaagataatgtccactagcagtagcaaggagcttgtcccctacttccttgaactcttttggaagtatcaggaaaatgatgcggtgcgatcagttgcggttagctgcgcaggcattaaaagaaaaacatcaatgcagctctcagtttttgaagactacacaaaaacgctccagcaagaacagctggagcgaacaattgataaaattagagagcgttatggttttaaggcgcttatgcatgcgaatagcttagtagccggggctacagggttgaaacgtgccacattggttggtggccacaaaggataagccaaagtataatttatttgcatactccccttcttatttaagaatgtcgtatagtgtattgatgttactagaacatgtatgtttttcttatcggttaaagcagagagttttttcctatttagttatctaacaaactaaaaatatccctatatccctatatccctatatctatatatcgctaaacatgttaactataagagttacctgagcaatgttaattatagatatatataaatatccctatatccctatatctatatattactaaaaatgttagctataagagttgattgagcattattaattatcgatatataaaaatatccctatatctatatatagatatagggatatttttactctgtcatagctttgaatttacgacgttgttcaggagccaactcattgttaacataggtatcgattagcaaatcaataatttcgtaatcaaatttagtttttgttatggtttttagagcttgtaattcttctttggtttgcatagaagtttttattgttccagcttgatttttaaacttagcagcggactttgatatagattctgtttgaatgttgcttgacgaggaaggaagatctgaatccgtgtatgattcttgtggtttgaaatttcctggaactcggtttggtttcgaattgattaaacctctgccttttcctttgttatccattaatagcaccttctttttcttcttcaaagtaattaattctatctaaaagttcatctgaaactttatcatacaaatttagtactttttgatcatgacgatctttatctgtaataccgttgacatcaaaccttttaattctctccatttggggaacaacgttttcaaagagattgtcctcaccaaatgtttcttttgcgacttccattacatattgatctactgaaccattattcttatggatcacaggtaaaacgcccacaacctctaaatccaagtcgtattcattatgaagtttatttaattcttctacataactttcagcaccactcaaagatctttcatgagtctgtaatgaaattaaaacataatcagaacatatgactgcatttcttgtgactgctttagacattggaggaacatctattagtacaatatcgtacttaccttgtaaaggggtaaagatattttttaaataatagtcttcttctctttgattgctcgtatttttatatagatatttggggaaatcttcaaaatcaatatacgaaggtaagaggtaaaggttatccataattttcacttcaaggccatcaagatttttttcagagattcctgtcattaatgtcttttctatagttacaacttcatcttgatataaactggattttgttagcaataaacttttggtagcattactttgagggtccaagtctaatacacatacttttaagcctttctttgccaacttatatgcaagtaatacaacgtttgttgttttacctgctcctcctttataatttccaacagttataacagtagcagtatttttttgctgtatcttgctgataattgaattaatattattactcgacatctctattcctccttaaatttctatatatactaatatctaaatatctatattactatataagtatataattaattgtgaaataaagcaagtattacgataatgaatttatatagtttcaaatggcttaaataaaaggatttccaacattttttatagatattactaaatatctaaatatctaaatatctataaatagataaaaaaatagatatatagtaatattaatttatctatatatctaaatatctatatatctatattaagagtaaaaaaagttctttacaaaataaaattttgattgtaaagtaaagtcaaacaaaaaaaaggactcgctcatgaaaaagtactaccaatactttttcatgaatcctctcatctaccaaatgagggataacacgaaacccttcttaatactataattcgattaaaatccttaaaaaaattatagcataagtaggcttatttaacaatgcttttaaccgcattttatctaaggtttttaacgtttcgtggcgatgactttgctccgaaacgtttgttgttttctgacaaactggctaggtggcaaagtttgtccttttttattggcaaattggtgcggataaaaacaggaaaggggagctacttatgcttgtcagtgatgctatttatacatactctgcagtaatcaacacggtggtacatgaaggtttaactgcttatcgtaaaaaaaatagtcgcggtgtgatggccgtgcgtgatcatttcgctgcgatcgaagcagcaagtaccaatcggaagggtgttcagttcgtcgttcgggacaaaagtcatctacaaacgaagtgtggcgtgaaaggctttattgtcactagtcaagaagcgttgatcgcagaagtagatcagattacacattggacaccgaatacataccgagttggcacttactcggaccgaaatcggaaatacataaaaggacacgaagaaaagaacttacaacaaatcaatacgtttgtgatcgatatcgatacgcaaaaagtcgacgtggcaaaaatgatcacggcatcgatgcgtgtcttgaatcaaacacctacgttcatcttgaaaaccgatcacggctttcaaatgtacttcgtactagaaacacctagctttgttagtaatgcgaatcaatttaaatcgttaaaaatcgccaaaagaatttcgcaaaacgtcaaatatgcgtttgcggaagagttgccagctgtcgatattggctgcaatgactttggtttctttcgcgcgccaaatacgcagaatgtagcctttttaaacctagaaagtcaattcgatttccatgaaatgatggaatggtcgaaaagttacagtgatcaaaaacggcgttcggtgctttctttggtaccggaatcttcaactgcagtctttgatgcgaccaaacaagaatggttttccatcatggcgaatctaaaaaatgtacgtggacgcaaaggccaatacggccgaaataacgttgcatttaccctagcgttagcttgttatgcgtccggtaaaagtaagcaagaagcgacagatttgcttgatcagttcaatgacacgctggatgcaccattgcgatttagggaaatcgaaacatgtattcgtaatgcatactcgggaagataccagggcgcaaatgctgaaaaaatcagcgatatcttgcagacgtattggaaatctgaatacgaaatcaagggctacacgccatttatctttgatgaagtaggtaaggttaaacctcaattctttagaaagcacaggaagagtagggaagaacgtacgtattcgcattttagcgaatgggaaaaggacttagaatgttacatcgagtcacagctgttatccggacaaacttttttagaacgttcgcagcgctcggtcgctgaagcattaaaaatgccttatgcgacgctaaaaaaaatactgaagcaatcggatcgtattattagcagagtgaacgggaaggggagagctgcccaaacccttttttctacagtggccatcgttgtggagcaagcgatacgacacgccttgacaaagaaagtggcagaaaaagaagcctacctggaatttttagcgagttttacggacgcagcgaagcacattcttgtgacgttgcaaacaaaaggtgtccccgcatccggttttaatatacaccctgttgtccagggggatagaagtgtccagctgtccttgaatctcctcgacaagctctatcagcagcgtcccaacaacgataattgccaaagcaggtatggttaaattaaatgggctcaattgccaattacttatttctagttactgttggctgttgttttgactattgactagtactctattaatctaacgttgtgtggctttttccttactactggaggatttaagattaatataagttattaaattagaggtgtatatttttttaaaaaatagaatatggagatactcaacggagtaataaaaaatccttataatcaatgctatacgctaattacaggttattttatctggttctgttgcaaagttttatttaactgattatttagtgtagaatggaagaaactacacgaggagaataacaatgtcccattttaaaggtaaacaattcaaacaggatatcatcatggtagccgtgggctactacttaagatacaatttgagctatcgtgatgtttcagaaatccttaatgagcgtggaatcaaggtttgtcacacaactgtttatcgatgggtacaagaatatggttcgattatttattgcctatggaagaaaagaaataagtctgctagcgattcttggagaatggatgaaacatatattaaagtaaaaggaaaatggcattatttgtatcgtgccatcgattctacaggtttgacattagatatttggttgcgaaagaatcgggataaacaggcggcctatgctttctttaaacgattaatcaagcaatttggagaacctagagtttttgtaacggacaaagctccttcgctaagcagtgcgttcaatcgacttaaatctgaaggtttattttctaacactgaacatcgaacgagtaaatatttgaataatatcattgaacaagatcataggcctatcaagaaaaggcacaaattatatcagtccataaggactgcctcatccacaatcaaaggaattgaaactatacatgctttatacaaaactagccaaagagacttttctctctttggcttttcagtgattcatgaaataaataatctaatgggtgttccagcttaaaattagaaaatagttgagatatcattttacttctttgaactttgcaacagaaccagaaaatcaacaactcaaaaaatggattttagagatttatagccaagccaaaaagcgctttggcgctgctaagattcaagttgttttaaagcgtgattatggcgtatccattagtttaggtcgggtttatcgcctacttcgtcaacttcaattgcctaaaatgtccaccgtaaaaccaagctatcaaaagagaaaagtggatgaagcacctcatgactcttgtcctaatcatttaaagcaagcgtttaatccacctgcacctaatcaggtttggacaaccgatttttcttacatccctgtaggaaaaaaaggctttgtttatttatgcattgtcatgaacttattctcacgaaaaatcattgcctggcaagtcgcccataagatcaatacagatttagctcttcaaacactggaagttgcctataaacaacggcgaccgtctcaaactgtcatgattcacagtgaccgagggtcacaatatacagccaaagcgtatcgcagatggttagacgagcatgatctgctcgcctcttattccaaaaaggcttatccttgggataacgctgtcaccgaagccttctttaagtatatgaaaaaagaagaactagatcggcgagctttttcttccattcaagatgtgcaattagcttgttttgaatatattgaaagcttttataatcggcaccgtcctcactcgactattaacatgctaactcctgaagaaaaagaaaattttttatttcagcaatcagtaaatgattcttttttgtgtctactttattgacattgatccaattcatagtacaattacctcctatcattttccaccactactttcattattatactttcttcgataaagttcaataaatattatgttataatataaaggcagtagcaaagtgagaaagatggtggctaaatcctcattagggggtgatgcctatgcttgaatgtatagttttactcctggaaaggagctagacttgtctgtgtttgaagcacttacgctgatgatcgcttttgcgacattagtcgtgctgatactaggctttgagcaaaaaaaataaccatctaactcgcttttgaccgggtgtgttagagggttacttcttaatatatctatggttaccgtctttttaacggtgctactgctggagagctatgttgaagcatagctctcttttcattgttagtataccacaatagccattttaaaaacaatattttcttctttcgttatttaaaggcaagaccataggatactttcctcacggcgttccagccaccaccgctctgttcggaaagaaaacactaggaaaataatcacgctatgatgcgttttattatattttatttgtatattcattataactagaagtttcactcacaagccccataggccgaactgtatcaacaatctcatacaactgcgaaaattggttagctgaatacttcacaaaacgacctgtaatttctttcactacatattcccctggaaaaagcgtaattgtaccatatcgggtgtttataaggagtcgattccccttggctaagcgtttcatctcattttcttcacaaaaataggcgactgcttcctggttaaatccatcataaaaaataacttgatccgtcgcctttttcttgcagcctaattgctcttcagcgtgataaaccgtttcgccaacctttccaaactcactctggacaatgatttgctctaagtgatggtaagcgccatggtgccagaaatacacatgtttccagtcttctctttcaattcgatcataagacttcatcacaatatcatccaatgtcaaaagcaaattcagatctgcttcttgaaaaactttataaatgaatattcgatcgtcaattgttcttaccttaagtattaatgggaccacggcatatagacctttcttaaacagccagcgcttaaagaaaaagtctgggatatcataccttcgctgtatctcctctacagaccaacccattctcgtcaactcatcaaacatccgtttactaaacatcttttgccaatgtaagattcgttctaaattagtcgcatttaacggatacttgatataatgccattttaagagatctttcgcatgtctcttttcttctgcccgtatctcatcctttttttgaagcagctcctgttccaacctccggatcagtatcgaacacgtttcaatttgtcgacatatctcgcaagttatcagcgtcccttctttatgatcttcgtgttctttttcgtgcgtctcatacaattcggccaataagaaaatagcagattgcttatcatataagatatcttctactgtcctcatgcttctctactccttattatcgacttgttcatcttccagaacttctagaataaacaattcgttcatgtcccgaatatgtaaagattgacagattcgttctaaatgagtaatttggacacgttgtcgacgatcattggcatacgcactaattttggacggctcaatatcggttcgcctagaaagttctcccattgtcagcttatatttttcacaaatgcctttgatattgattctgatacgcacatctggttcctcatataaccgcaaattattctaccccatctccttgatcttatctcctattttatagaaaacttgccgatacaggtttaccgatatagacatgcctatatcggctatagatgggatacccatgttaaaaacgatattttttaggtctattattttcttttactttctgtgtttgtttcctgtcttgtagcggaacttgtttggtccattctttttccaaataaccgacaaagtttatcaaagtagagttctgatacttcggaagatcgagcacgatcccttttttgtaggcattcataaaatctgaaatatatctcgatgtccgggtataaataggcctaattttatttttcacttcccgatactggtcattagagatgaaagctgtctgaatatgtgtactatctttgacaatgagtgtatgactataatctagtccagctttaggtcgatctttagacggtgtcgctacaccatttcgatgattcaaatgacttctgaaaggaattaagtaatgatagtggtccttttgaatatctagatataaataagtacgccgcatttgtttttctggatttcctggatcaagcatattaatgaaatggggattagactgaaaaaattcttttttcaaccgtactacttgatacttgtatggtttatcgttcattccttgcagcaccctcttatccataaaaaaagacccgtctatttttagacgagtctttttctataagtttgtaggttttttatttttttatgagaagatcaccaataaaacttctcgaatacgattggttttttattttttctgtgaagatcaccaataaaacttccctaatttcctttattgtacatcatgcaaacgattttctcaagtatctgcagctaggaaagctattgtgccattttggtttgataaacgtttttcgctgtaacaaccagccatcgtacgacaaatataagtgttgcgacaagtaaaatacttaccacgattttgcccacaaataaaaagagaggaatcacaatagcaagtacgaaggcactcataagtaatatatgccaggtaaagtagaggataataaggattgttaccacaatcgcgatcgcataaataaactttgtaccattggaactcgcttgaaattgatcgcctaaaaaatgaaggaacgctaaacatccctttcctaaaagggctagaataatcatccctaattgcataatcccttccactatccaatcgacaaaatgaaataaaccttgaactacttgcatccctatctcctcctttttttaaagagccatatcgagtgctagcattgcttccttttgtaccatatcgaagtcatgttctaaaatatggatggttttttcccgtccaatggagtatctttgctgtcttaccattccagtatcttcatcgctgcagatgatcatatatatttcatcattaatgatcatttcaagctccgctaggtacgcttgcaccatttctatagataacgcttgatccagactcataaaggttagataatcatccgaatctcctgccacatcttgctctagtactagtatatcacgatttctttgcgataatgtaactattttatagcgtttgatctcttttttgtccgttgtttgtgaaggttggatagatgtcaataaagtagacagaaaaaaggaatattttatgaagaatcaattagaaaagcaagttcttttaaattaggtgataagaagttgtttgcagaatgtggtctttttgaattatagaatccttcaatatactcaaaacaagctaattttacttcttccaaagaggaaaaatttcgacgattaagttcttctttcttcatgtatttaaagaaagattctgtgacggcattatcccacgggtaagcaagtttagaataggaagggataaggttgtatttttcttggacctgccgtaattcttgagacaaatattgggaaccacgatcagagtgaagaataaccgactgcacaggatttctagaatgaacggctcgctctaccgtatcacaaactaattttgcagtcatagaggcatagacattccaagcaatcacttttcgagagaagatgtcaagaattacacaaagataaacaaatcctttttttacaggaatatacgaaatgtcgctgacccaaatacgattgggttgcttggaatgaaattgctgtttcaacagatttggacaagtagaagaaaccgtcggtttttgataacggaatcttggttttacggtagacattttaggaagatccatggttttcattagtcgatacactcttccgatactaatggaaataccataatcacgctgtaaaactatttttatcttggctgcgccgagtctaaactttgtctcggtataaatttgtaaaataatccgtttgatttgttggttttccacggaacgagccgaagggattttggataaaaatttgtaataggtactgcggttcactcgcaatacttggcagattcttacaatagaatgatcggtagctaacagagaaatagcctttaatcgttgctcgagtgtggcgtgaagatggcaatcgctttttttaagattaaattttcttcttctagcaaggctttctgtttttgaagttcgcgaacttgtttgacagttagcagttcgccagattccatttggacttcggaataaagtttaatccatctagaaagagcggtttgagagacaccatattctttgcataaagcagcttgtgttttacctccgttgtataaatttactagactctttttaaaatcttcatcatattttttgtaattagacataagctgtagttcctttcgttttagtgtctactttataaacagtataccattaaaaaaactgtctactttattagtatatatccaactgtagaagttgatgttcatttaacagatggaacgataggaagggcagctgttccttccggtgcttcaactggagatcgagaggcagtggaacttagggatgggggcgatcgtttacagggattaggcgtgaaaaccgcagttcagaatgtaaatttgacattaaatgatgccttagtagggataagtccatttaaccaaagagaaattgatcataaaatgattgaattagacggaacagcgaataaaagcaggctaggagctaatgctatcttaggtgtttcaatggctgtagctcgtgctgcagcaaagtctgaagcagtccccctatatcgctatctgggtggaatcgatttagaacttcctcgtccattttttaatgtcattaatggcggaaagcacgcagattcaggtatagatgtacaagaatttttaatcacacccattgcagcgctctcttttcgagaaggcttagaatccattgcggatgtttaccatacattgaaaaagcttttatcaaaaagaggattggcgacctctgtaggtgatgagggaggatttgccccacgactcgcttctacagaagaagctcttgaagtattggtagaggccataaaaaaagctggatataagcctggagaagatatcgcgattgcgatggatccggcagcaagtgaatttagtgaaaataacacttattactttgaggggaaacaactatcatctgaagaaatgatccactactacgagcatctcgtacaagagtttccgattatttcgattgaagatggattgtctgaacatgattgggagggctttaaattaatgacggagaaattaggaaataaagtccaattggttggggatgacatttttgttacaaatccaattatttttcagcaaggaatagataaagggattggaaatgcgatcctcataaagctaaatcaaatcgggacagtaacagaaaccattgatacgataaatttagctagaaaaaacaattatgcaacgatgatctcccaccgttcaggggagactggggacacctttatcgcggactttgcagttgctatgcatgcagggcaaattaaaacgggttcaattgcacggtcagaacgtgtagagaaatacaatcaatttttacggattgaagaagaacttgcaaaaataaagtaaatttgttagggtttaaagggaatatagttaaatgaaaaatcaaatagtgacgatcggttgagcctatgcttcaagttctgttttctggggggagaaaacgttctttacgcataggcttttttcgttttaaggaaggaatgaagggtatggaaaaaatttatttagcgattgctcttgtattaggtgtgtcgcaaatttttggggtattggcaagtcgaatgggcttacctaaaatagttggggagttattagtaggtgtagtattaggtcctagtttgttaaacatcgttcaacccggggagtttttacatatcttttccgagataggtgtattgttactgatgtttattgccggtatggaaacggattttaaaaaattgaaggccaatttaaagccgagcattattgttgctttatttggtgttataattccattggttgcttttttactatttggaaaatatcttcatatggagactatggagtcattttttgtcggaattattttctcggcaacttcagttagtattactgtaaaaatattcatggatagcgatatacttcaaacaaaagtggcagccattgttttaggcgcagcggttattgatgatattttggcggtcttgttgataagcgcttataaatcagtagatcagttagcgactgcaaatatcttttttatgttatgggatttgcttctttctaaaatacttttctttatcatgctttatttattctataaatttgcattaccatggataaaacgatacacggagaaatggacgtggtcctttttaccagttactatcacactaattatctgcttcttttggggatactttgcagaattaatgggattaagtgctgttttgggttcattcttttttggattaatgttggcaatctctggaaccaagcagcgcgtagagaaagaaatcgatctgattgccaattccattttcattccactatttttaacttccatcggagcagcgatcacattaagtgatatttggggaaatgtaggtccgatagcacttggtacattgctggcgattattacaaaactcggaagttgttatattgctgctagagcaagtaagttaagtcgtccggattcatttttgattggtagtggtatgatgtctagaggggaaatggcgttagtcacacttaatattgggatatcgctacatttcataggtgaagactattactctatattcgttgcgatcattgtgatgacgactattttgtcgcccttgtttattaagcttgctttgccaaagagttctcattaaggagtatttgagggatatggaaaaattatcaaaggaaattatgttgcaagtgttactaacttgcgaaagtgaaaatgcaacgacttgggaacttagtaaaatgattattgacgttgaaggcgccaatcgcttcacgaaatcagagttgttaaaagcggtttatacacttgaatatctaggatatgtaaaaagaataaagtatgggagcagtgtacgatatacgaaaaccaatgaaggagtaaggtttttggatgaattaaagacacagataaaagataatcataatgaagatgcaaatatcaaacaataagactatagtgtcaagggccatattaaaatgttggtttt

SEQ ID NO: 2058 - DNA, 3011208 bp, Listeria innocua (residues 1-1,505,604 of 3,011,208)
taattaattctaacaatttcgttacagatttctttacacacaagttatacacaagttaactggctgtggacaaccgtttttcacatctggacagttttgtggatagattttgtaagtccttgctatcagagtgattttctgatattataattcctgtcgaatagaaatatagctggggaaaaataaagttatccacaatacattttcactttgtggataattttttaacagtgtttggataaccttatccatggctttttctatctgtggataactttagagcatccatttacattacacaaaaaaggggggttactagtgcaatcaattgaagacatctggcaggaaacactgcaaatcgtcaaaaaaaatatgagtaaacctagttacgatacatggatgaaatcaacaaccgctcattcacttgaaggtaacacgtttattatttcagcgcccaataattttgtacgcgattggttagagaagagctacacacaatttatcgctaacattttgcaagaaataactggtcgcttatttgatgtccgctttattgatggtgagcaggaagaaaactttgaatacactgtgattaaaccaaatccagcattagatgaagatggtattgaaattggaaaacatatgcttaatccgcgttatgtttttgatacatttgtcattggttcagggaacagatttgcccacgcagcatcacttgcagtagccgaagcaccagcgaaagcgtataatccgcttttcatttatggcggagttggccttggtaaaacacatttaatgcacgcagttggccattacgttcaacaacataaagataatgccaaagtaatgtacctttccagcgaaaaattcactaatgagtttattagctccatccgagataataaaaccgaagaattccgtacaaaataccggaatgttgacgtcttacttattgatgatattcaatttttagccggtaaagaaggaacgcaagaggaatttttccatacatttaatacgctttatgatgaacaaaaacaaattattatttccagtgaccgaccaccaaaagaaattcctacactggaagatcggcttagatcccgctttgaatggggcttaattactgatattacgccaccagacttagaaacacggatcgccattttacgtaaaaaagcaaaagcagacggacttgatattccaaatgaagtcatgctttatattgcaaaccaaattgattcgaatattcgcgagctagaaggcgcactcattcgagtagttgcttattcttccctcgttaataaagatataacagctggtcttgcggctgaggctttaaaagatattatcccctcttctaaatcacaagttattacgattagtgggattcaagaaacagtgggcgaatatttccacgttcgtttggaagattttaaagcaaaaaaacggacgaaaagtattgcattcccgcgccaaatcgcaatgtatctttcaagagagcttacagatgcctcattaccaaaaatcggtgatgaatttggtggacgagatcatacaaccgtcatccatgcacatgaaaaaatatcgcaactactaaaaaccgatcaagtgttgaaaaatgaccttgctgaaattgaaaaaaatttaagaaagtcacaaaatatgttttaatagacctgtgtacaatgtggataactggaacatacttacccacaagttatcaacatgtggaaaactttatgtcgcatggctcaaaacatacttatccacaaatccacagtgcctattactattactacgattttttattaattaattaaaggtttttgaggttttacaaaatataaaaaaatgggggatactcatgaaatttgttattgagcgtgatcgtcttgtccaagcagtcaatgaagttactcgtgccatctctgcaagaacaacgattccaattttaacggggataaaaatagtcgtaaatgatgaaggtgttactttaaccggtagcgattctgatatttccatcgaagcatttattccattaatcgaaaatgatgaagtaattgtagaagttgaaagttttggtggtatcgttcttcaatccaagtacttcggtgatattgttcgtcgtttacctgaagaaaatgtcgaaattgaagttactacaaattatcaaactaacattagttctggccaagcttcctttacactaaacggcttagatccaatggaataccctaaattaccagaagttactgatggtaaaaatattaaaattcctattaatgtccttaaaaacattattagacaaactgtttttgctgtttctgctatcgaagttcgcccagtgcttacaggtgttaactggattattaaagataacaaacttagcgcagttgcaaccgatagtcatcgtctagcattacgtgaaattccacttgaaacaaatattgacgaagaatacaacattgttattccaggaaaaagcttagctgaactaaataaaattttagacgatgcaagtgaatccattgaaatgacactcgcaaataatcaaatcctatttaaattaaaagatttattattttattctcgtttactggaaggtagttacccagatacatcacgcttaattccaactgatactaaatcagaacttgtcattaattccagagcatttttacaagcgattgaccgtgcttccctacttgctcgcgaaaaccgtaataacgttattaaattaatgacccttgaaaatggacaagttgaagtatcctctaactctcctgaagttgggaatgtttcggaaaatgtctttagtcaaagctttactggtgaagaaattaaaatatcctttaacggtaaatacatgatggatgcattgcgcgcatttgaaggcgatgatattcaaatctccttctctggcacaatgagacctttcgtacttcgaccaaaagatgctactaatccaaatgaaattttacaattaatcacgccggttagaacttactaatctcgcaaaaaagcacatccgtcttggtttcaaggcggattctttttttgttatagtacagattttgaataaaaatgtatatttatgcaaatggaggtaattcttagcatgatgaaagacatgacaacaggtaacccgacaaaattaatctttttattcgcgatgccgatgttgattggaaacttatttcagcaattttatacgatgattgatgccgttattgtcgggaaatttgtaagtgtagatgcccttgctgcagttggggcgacaaactcagtcaatttttttatgatttctttgattattggacttatgagcggtatttctgtcgtagtagcgcagtattttggttttaaagattatgatcgtttaaaagatgtaattgctactgcaacgtatgcggtggttttttcggcggttattttaaccattgctggcgttttacttgcgaagccactccttattttactgagaacacctgctaatattttggatgattctactatctttttaaccactctttttattgggattttaccgatgagtctgtataacgggatggccgcgatacttcgagctcttggaaattcgattacaccgctgatttttttgattttatcgtctttaatgaatattgcattagattttttatttgttgtttatatgggtatgggcgttcgtggggctgcgattgcaacggttttatcccaaacagctgcagcaattgccgttatttactatgcttatcgccacgtgtcttttatgcgaatagagcgtgccaaattcaagctttctaccccactacttaaagaaatggtgcgaattggacttccttctggtttacaaggatcatttatttctatcgggaatatggcacttcaaagtttaattaatggttttggttcgtccgttgttgcggcatatactgcagcgagtcgaattgattcacttacatatcaaccaggaattgcctttggagctgcctcctcgatgtttgctggtcaaaatatcggtgctggaaaaattgatcgtgttcgcgaaggtttttggtcaggaataaaagtagttacagccatcagcattggaataacgattttagttcaacttttcgctcggcaatttttattactatttgtagattctagcgagacagaagttattaatattggtgtgagttacttacttatagtgtcgctattttacgtcgttgtagggattttatttgttgtgcgggaaactttgcgtggtactggagatgcgatggtacctttagcaatggggattttcgagttagtttcaaggcttgctatcggatttattttatccctttatattggttatgttgggctttggtgggcgaccccagttgcttggatcaccgcgacgatgctcggagtatggcgatataaatcaggagcttggcaaaaaaaggcagttatccgacgaaaataaccattttaataaaaaaacgccacagaagctcatattttcttttttttaataaataatatccccccattagttttgctaaaaaaagctgaaaaacgaatatatgaaaatattctttgtattattagcaaaactttagtaaaatagaaggtagtgataaaaaaagattgggcgtgaaatttttggctgaaacagtaaagataaatagtgagttcgtaacgcttggtcaacttttacaaatgattgatgtagtttcaactggaggaatggcaaaagcgtaccttagtgaaaatacgatttacatcaacggagagcaagataatcgccgggggaaaaagcttcgtaatggcgatgttatcttagttcctggtgttggaaaagtgaaaattgagcaaggataatagcagatgcatttagaaagcattgttttaagaaatttccgtaattatgaaaacttagaactagaattttccccgtctgtgaatgttttccttggagagaatgcacaaggtaaaaccaaccttttggaagctgtgttgatgcttgctcttgcaaaatcacatcggacaaccaatgataaagattttattatgtgggaaaaagaagaagccaaaatggaagggcgagtagtgaagcgcgggcaaacagtgcctttagagcttgctatcacccaaaaaggcaagcgagctaaggtcaaccatttggaacaaaagaaattgagccaatatgttggtaatttaaacgtggttatttttgccccagaagatttatcgcttgtgaaaggtgctccaggagttaggcgccgatttttaaatatggaaatcggacagatgcagccgatttatttgcataatttaagtgaatatcagcggattttgcagcaacgaaaccaatatttgaagatgttgcaaatgaaacgtaaagttgatccaatgttgcttgatattttaacagagcaatttgcagatgtcgccattaatttgacgaaaagacgagctgattttattcaaaaactagaggcatatgcagcgccaattcatcaccaaatttcacgaggattagagacacttaaaatcgagtataaagcttctgtcacccttaatggggacgatcccgaagtgtggaaagctgatttacttcaaaaaatggaatcaatcaaacaaagagaaatcgaccgtggtgtcacacttattgggccacatcgggatgattctctgttttatattaatgggcaaaatgtgcaagattttggttcacaaggccaacagcggacaacggcactttctgtgaaattagcggaaatcgaccttatccatgaagaaactggtgaatatccggttctcttactcgatgatgtgctcagtgaactagatgattatcgtcaatcgcatttgctcggagctattgaaggaaaagtacaaacctttgtaacaaccacaagtacgagcggaatcgaccacaatacgcttagacaagcaacgacattttatgtagaaaaaggtacagtaaaaaaatcctaatttaggttaatataatttgatgaaaaagaaagtgcggtggaataattaatgtcagaagaaaatattacaaatgtacatgaaagtgcttcagattataacgaagatcaaatacaagtactagaaggcttagaagcagtaagaaaaagacctggtatgtacattggttcaactagccaacgtggactccatcaccttgtatgggaaattgttgataatgcaatagatgaggcccttgctggtttctgtactgaaattgaaattacaattgaagctgataacagcattactgttcgcgataacggacgtggaattccaactgggattaacgaaaaaatcggccgtccaacagtagaagtaatctttacagttcttcatgccggcggtaaattcggcggcggcggatataaagtatcaggcggacttcacggagttggtgcatcggtagttaatgccctttccacatcccttgaagtatacgttcaccgtgaaggacaaaaatattaccaacgttttgaacgcggtgatgtagtcatggatatggaagtacaaggtgaaacagattaccgtggaactattgttcactttacgccagatccacaaattttcactgaaacaacagaatttgattttgatacgcttcgtactcgtacgcgcgaacttgctttcttgaatcgtggcttaactatttcgattgaagacaagcgtgaagagcacaaagttcgtaaagatttccactatgaaggcggaattcgttcttacgtggagcatttaaataaagcaaaagacgttatccatgagccaccaatttatttggaaggcgaacgcgatgacattatggttgagatttccatgcaatataatactggattctcaagtaatatcatttcatttgcgaataatattcatacgtatgaaggcggaactcacgaatctggatttaaaacggctttaacgcgggttattaacgactatgcgcgccgaaataaattatttaaagatagtgatgataatctttccggtgaagatgttcgtgaaggtttaactgctattatttccatcaaacacccagatccacagtttgaaggacaaacaaaaacaaaacttggaaattcagaagctcgttctatcacggataagctgttttctgaggctttaaataaatttatgatggaaaacccagatgtagctaaaaaaatcgttgagaagggcgttgtggcttctcgtgcacgtttggctgctaagcgcgcccgtgaagttgctcgtaaaagcagtggtctagaaatttctagcttacctggtaaattagctgactgttcttcccgtaaccctgaaattagcgaactttacatcgttgagggtgactcagctggtggttcagctaaacaaggtcgtgaccgtttattccaagcgattttgccgattcgtggtaaaattttgaacgtggaaaaagctcgtttagaccgtattttagctaacgaagaaattcgaactatttttacagcgatgggtactggttttggtggagattttgatgtttctaaatctcgttaccacaaattaattattatgactgatgccgacgttgatggtgcacatattcgtacactacttcttacgctattttatcgttatatgcgtcctctgcttgatgcaggttatatttatattgcacaaccaccgctttatcaaattaagcatggtaaacaaatcgagtacgtatatagtgacggacaattagaagattatctagcaagccttgatggagacactaaatacagcattcaacgatataaaggtcttggagaaatgaacccagagcaactttgggatacaaccatgaatccagaacaccgtacactacttcaagtgaatatcaaagacgctattgatgccgatgaaacttttgaaatgttgatgggtgaccgcgtggaacctcgtcgtaaattcattgaagacaacgcgcaatacgttaaaaacttggatgtttaataaatatttcccgggtaataattgggttattaattgtttttaaaaggtatgaactagattcagccttacttttgaaagggaggtttctctaacaatggcagaaacaccaaatcaacgaataacagagataaacttgaataaagaaatgcggacatcattcttagactatgcgatgagtgtaattgttgcccgcgccctaccagatgttcgtgacggattaaaaccagttcaccgtcgaattttatatgcgatgaatgacctaggtatgacttctgataaagcgtataagaaatcagcacgtattgttggggaagttattggtaagtatcacccccacggcgatacagcggtttattttacaatggttcggatggcgcaagattttagttatcgtaatatgctagttgatggacatggtaactttggttctgtcgatggtgatatggcggcagcgatgcgttatacggaagcacgtatgtcaaaaatttcgatggaactactgcgcgatatcaacaaagacacaattgattatgctgataactatgatggttcagaacgtgagccagttattttgccagcacgtttccctaacttacttgtcaatggttcgtcaggtattgcggttggtatggctacgaatattcctacccatcatctgggtgaagtaattgacggcgttttagcccttagtcatgatccagaaattagtattcgtgatctaatggaacatattccaggacccgacttccctactgctgggatgattatgggtcgtagcggaattcgccgtgcttatgaaagcggtcgtggttctattaccgttcgcggtcgtgttgatattgaagaaaagaaaaatggtaaagaaacaatcgttattaccgaaattccttaccaagtaaataaagcgcgcctagttgagcgtattgccgaactagctcgtgagaaaaaaattgacggaattacttctctaaacgatgaatctgaccgttccggaatgcgcattgtcattgaagttcgtcgtgatattagcgcaagtgttatcgtgaataacttattcaaaatgacagcacttcaaaccacttttggtattaatatgctggcacttgtcgacaatcatccaaaagtacttaatttaaaagaaatcctttatcattatttagaacatcaaaaagtagttattcgtcgccgtacggaatttgagcttcgtaaagcagaagcgcgtgctcatattttagaaggtttacgaattgcgcttgataatattgatgcgattattaaattaattcgtggatcaaaaacttctgatgtagccaaagaaggcttaatgactcaattcaacctttctgataaacaagcgcaagccattttagatatgcgtttgcaacgtttaacaggtttggaacgcgaaaaaattgaagaagaatatcaaaacttagtggcattaattaacgatttaaaagccattttagctgatgatgagcgtattcttgaaattattcgtgaagaattagaagaaatcaaagttaaatatgcggataaacgtcgtactgaaatcttggctggtgatttagtgagccttgaagatgaagacttaatccctgaagaagaagtggcgattacgctaactaaacgtggctatattaaacgtttaccattatcaacttatcgtagccaacgtcgtggtggtcgtggtattcaaggtatgtctactcatgaagatgatttcgtagagcaccttgttgcaacgagcacgcatgatacgttactattcttcactaacacgggtaaagtttaccgttcaaaaggttatgaagtacctgaatacggtcgtaccgcgaaaggtattccaatcatcaacttacttggaatcgaaagccaagaacaagtgaatgccgtgataaatctatccgaattcactgatgacagctacctattcttcactactaaacacggtgtcgtgaagcgtaccaccctttctcaatttgcgaaaatccgtcaaagtggtcttcgtgctgtagaacttcgcgaaaacgatgaactaatctctgttcaaatgacagatggtagcaaaaacatgattatcgcaacgaaacatggccaatctatctacttcccagaagaaaatatccgcgtaatgggccgtacagctgccggtgtccgtggtattagacttcgtgaagacgatgaagttatcggtatggaagtactagaagacgatgaaaaagtactcgttgtaacagaaaaaggatatggtaaacaaacgccagcctcccagtatccgctacgtaatcgtggtggtatgggtgttaaaaccgttacaattactgagaaaaacggtaatttagtagcaatgaaaactgttactggtgaagaggacttaatgttaatgaccgtgagtggcgtattaattcgttttgaaatcgatactgtttctcaaactggtcgtagcgcaatgggcgtcaaactaattcgccttgatgaagatgaaaaagtagccactgttgcaaaagtgccaaaagaagaagatgaagttgagcttgaggaagaaatcgacgaaactctaatcacacaagttcctgatgaaagttttgaagatgctcctggaagcgacatagaagaataaaacgaagctggaaatgactctaatttatgaattagaatgattttccagctttttttcagcattaaaaagcgctttttggctgtattttatgtataatatctttaatacgtctaaaaaagagaagagttgaaaaaatgcgcaaactggtccaatttctgtttatagcagtagttttatttttagtggaatatgttttaatcaaccaagcagctatcttattcttaataacaagtggaatcatccaactatgcggggttattatcgcaattcggctacttctgttcgatcagcggaatactagctcaaaagtcgcttggattgccgttattttcattttgccagtgcttggaacaattagttaccttgtgtttggtagaaatccagcaactagaaaattcagtacagctcaagtgatggaaaaagctaaattaattaatgcgattcatgcaattccaaacaacaccaatgaaaaattaccaaggctttctaaaagaattgcgcatttaacgtccatagagccgattaagggaaataaaattgaaatattaacaaatggtgaggaaacttttccagtgctcctagacgcgcttagaaaggctgaaaaccatattcacattcaatattacatttttaaaacggatgcgatttctacagagattcgtgatattttggtggaaaaagcgaaatccggtgttgaggttaggtttatgtttgacggtcttggatcaagcaaactgagtaaagcctttttagctcctttgaaagaagctggagttagtattcacgcatttgacccaattgcctccccttggattgtaagaacagccaacttaagaaatcaccgtaaaattgttgtgattgacggacaaattggctttacaggtggacttaacattggggaagaatatcgctctaatacaccagattttcgtgtctggcgtgatacacacatgaaaatcacaggacaggctgttatcgaacttcaagaatcttttctaaatgattggatttatatggaaaatcaggctggggctgctgatcaatttattagtgaagctggattacaacaatatttttcaccagttgatgtaggtgatgaatgggcgcaagtgatatacggcggaccatatgataaagaaaaatgggttcgtgattcgatgcttgatttgattgattccgctaaagaatcagtttggattgtatcgccctattttgttccagatgaggaggctcttgcggttattcgccgggttgcaatgagtggtgtcgacgtacgggttattattcctggaaaaggcgatcgcgggatttcattccacggaagtaatgcttatgtaaaaacgatgattgaagcaggcgcgaaaatgtatgcttatgccgatgactcttttgttcatgcaaaagcaatgcttgtggacggaacacgtgcggctattggaactgccaattttgacgtgcgaagttttagattgaatcatgaattaatggtattcttatatgatgaaagtgaggctatgcttcatttaaaacgtgattttaagaaagattttgaagatagccgactatttacgatgaaagatatggaaaataaaccattattgactcgtataaaagaagttctatccagtttactatcaccaattttataatttaggagtggaaaaatgagtggagatttaaaacttagaccgcttgaacgagaagatttaaaatttgttcaccggttaaataatgatgcgaaaattatgtcttactggtttgaagagccatatgaggcatttgtcgagcttcaggagctatatgataagcacattcacgaccaatcagagcgccgttttattttagaattagatggtcaaatggttggactagttgagttaatggaaattgattatattcaccggagagcggaatttcaaattattattgatcctaagtttcaggggcatggttacgctgtttctgccacaaaactcgcgatgaaatatgcttttcatgtactaaacctgcataaactatatttagtagttgataaagtaaatgaaaaagcaattcatgtctatgaaaaagttggttttattcgtgaaggcgagctaattgatgaattttttgttgatggaacataccacgatgcaattcggatgtgtatttttcaacatcaatatcaagaaatggatatttaaaaggtgattggcgtgggaaaagttgcgccagtcattgttttgggtcaaaaaaagttctataataaggttttagtgaaaaaattatggtatcatgaagtattaaagtttgtattattttgatggagaaaggattggcgtgcattggctacaggcattgggacagctaaaatgatattatgcggagaacatgcagttgtatacggagaaccggcgatttcagtcccatttacacaagcaatagtaacgacaaatgtagaaacttctacaaaaaccaaattttcttcggcattttttacaggtgatttagaaaatatgcctgatttcttagcaggaatcaaagcattagtagtagatgttttaaatgaaattggtaatggtgaaaatgtatctattcatgtaacttcaggcgttccgattggccgaggattaggttcaagtgctgcagtagcaacaagtattgcgcgtggcttatataaatacttcaatcaagaattagactctaaaaaactattagcaattataaatgcagcagaaaaaattgcccacggaaatgctagtggagttgatgcgattacagtcgtgagtgaaaagcccgtatggtatgagcgagatcgaaaactagaaattatgcattttcctaaaaaaattacttttgtagtagcagatactggcgttccaagtgaaaccagagatgcagtaaaagatgtgcaaattttatacaaagaaaatcaagctgaaataggaaaaataatccaccaactcggtgatatttcccgggaaataaagttgcatttagaaggcgatgctgacactgtgaagataggtgctgcaatgaataaagctcaatcttatttggaaactttgacagttagtgatagcagtttagaaaaattaattaaagtagctagaagtaatggcgcggacggggcaaaacttacaggtggcggtagaggcggatgtattatcgctgtagcaaaaaatcaagaaatcgctaaacaaataacgaaggcgcttcataatgctggagctgcacaagaatggatttttacgattggagaaggtagttatgagagcgacagccatcgcacacacgaatgtggcgctaattaaatactggggaaaacgcgatgaacacttgattctacctgcaaacagtagtttatccttcacggtagataaattttatacaaaaacaacggtagaatgggacgaaaacttagcccaggatacttttattttaaataatgaacaaaaaacggatgcaaaagtagctcgttttatagataaaatgcgtgaagaattcggtatttcagcaaaagcaaaaatcacttccgaaaatcacgttccaactgcggccgggcttgcttcatcggcttctgcatttgcagctcttgcgcttgctggatctagcgctgctggcagaaaagacacaaaagaatacatttccagactggctcgtttcgggtctggttctgcttctcgttccgttttcggagattttgtcatttgggaaaaaggcgaactcgcggacggtagtgattcatttgcagtacctttcaccaataaattatgtgacaaaatgtctcttgtagtcgcagtcgtttctgataaagaaaagaaagtttctagtcgggatggaatgcgcctaactgtggaaacatctccgtttttcgaaaaatgggtttctgctgctgaaacagacttggaagaaatgaaacaagctattttggaggaagatttcatcaaagttggcgaaatcacagaacgaaacggaatgaaaatgcatgcgacaacgcttggtgcagagcctcctttcacttattttcaacctttgtcgctagaaataatggatgcagttagagaattgcgtgaaaacggcataccagcctatttcacaatggatgctggtccaaatgttaaagttatttgtgagcgtgaaaatgaaaatattgtagcagagaagttgtcaggtttggctaaaaacgttctaatttgccacgctggtaaggaagcgagtgttatatcagatgaaaaataaactacaggttaaaatacccggaaaattatatgttgctggtgagtatgcggtggtagaatccggtcacacagccattctaactgcagttaatcgttatataacgctaactcttgaagatagtgaacgcaatgaattatggattccacattatgaaaatccagtttcatggccaattggcggagaacttaaaccagacggggaacattggacatttacagctgaagcaattaatatcgcgacaactttcctaaaatcagaaggtatagaactaactcctgtgaagatggtcattgaaacagaattaatcgatcagtctggcgcaaaatatggactcggttcaagcgcagcggctacggttgctgtaatcaacgcgttaatgacgaaattttatccagaaatatcaatgcttaaaaaattcaaactagctgccctttcacatttagttgtgcaaggtaatggttcttgtggtgatattgcttcttgtatgtatggcggctggattgcttatacgacgtttgatcaagaatgggtgaagcatcgtttggcttataaatcactcgaatggtttatgaaagagccttggccaatgcttcaaattgaaacattagaagaaccagtaccgactttttctgtaggttggacgggcacacctgtaagtactggaaaactagtttcgcaaattcatgcatttaagcaagaagatagcaagaattatcaacattttttaactagaaataatgagattatgaagcaaataattcaagctttccatacgaaagacgaggaattgctctattcatctattaaagaaaatcggcgcattcttcaagaactcggaacaaaagctggcgtaaatattgaaacaagcttgctaaaagaactcgcggactcagccgaaaacatgggcggcgcaggaaaatcatctggctctggtggtggcgactgcggaatagctttctcgaaaacgaaagaactagccgaaaaacttgtcaatgagtgggaaaagcttggtattaaacatttacctttccatacagggagagttcaaattactgaataaattttaagcagcaaactaaaataaatagtttgttgcttttttgtttcgaatttcacaatctagggaatagtgaacagaatgaaagtttgtgaaatatttaatatatcaggtttttgaactaaggtattaaatcagatataatgagttagagtatgaacatagtgattctaaaaatgctaatcagttcagaaaaaagtttgtgagcttttttaaaagaatcaaatagtaaagcattttttcagttacataggagttctaaaaagcttctttcagcactccggtaatggtatttttgcgcaaaaatacacattagaaaacatcaaaaggaaaagaggggattcgggtgtcaaaggtacttaaatctttgctacttacggcactacttggggttaccggccttataagtggttgtggtgacttgacggtacttaatccaaaaggaccagttgcaaaaggtcagtcggacttaattatttattcgattatatttatgctggttattgttttgacgatttttgtattgtttacgattatgttggttaaataccgcgaacggaaagacatttcaaactatgagccagatatgcatggtagtagaaaactggaaattttttggacattaattccagttgctatcgttattgctctggctattccgactgtaaaaacaatttatgcaggggaagaagcaccaaaagtgacttcgcataaagatccaattgttatttacgcaacaagtgcagactggaaatggatttttagttatccagatgagtcaattgaaacagtcaactatgtaaatattccaaccgaccgtcctgttctgtttaaattaacttcggcagatacaatgacaagtttttgggtaccacaattaggtggacaaaaatatgcgatgtctggaatgacgatgaatttatatttacaagcagatgaggttggtacgtataaaggccgtaacgcaaacttcaatggtgaaggatttgcggatcaacgctttgacgtagtagctcaatctgaaaaagatttcaagaaatgggcaaaagaaacaaaagcgaactcgccagttattacgcaagacacatatgaccgtcttttaattcctggaagctccaagaaaaaaacttattctggtacgcatttagcatttgttgatgtagcagctgatccagagtatgttttctatgcctacaaacgttttggttatgaaatgacaaatccacataatccgaacacaaaatcaaccatttctgataaaccaatgcttccggttcgtcctgtgacagtaactaatccgcaatttgagcgtcatgatatgaagccacaaattattaaaaacggcgaaggttaccatgaggataaacaccgcgaagatgaaatgaagaaaatggaagaagacatccaaacaaatgaattcaataaaaaagaatcggatgacgcagggaactaaaaggggggacataaggcatgaaatggaatgagtttatcgtaactggtgacccgatgattttaggtgcgcagatttctatcgtacttgtaagtattggtgttgtcgcgttactaacttatacaaaaaaatggaagtggctcatgaaagagtggatttcttccgttgatcataaaaaaataggtattatgtacttgcttgctgctgtcttaatgtttttccgtggtggcgtggatgcgctaatgatgcgtacccagctcgctttaccggacatgaaatttttagacgcacagcattacaatgaagtattttctacgcacggaacaattatgattttattcatggcgatgccgtttatcattgggttgatgaacattgccgtaccacttcaaattggtgcgcgtgatgtagcatttccatttttaaacaacttaagtttttggacgttctttatgggagcgatgctatttaacttatcattcgtaattggtggttcaccagatgctggttggacaaactatgcgccacttgcgacagattttagcgctggatatggaattaatttctatcttctaggtgttcaaatcgctggtattggtacgctgatgacggggattaactttttcgttacgattttaagaatgcgtacaaaaggtatgactttaatgaaaatgccaatgtttacttggtcttcattaattacaagtttgatcattattttcgctttcccagttttaacagtggcacttgctttgatgtcatttgatcgactgtttgggacagcattcttcacactcacgaatggcgggctcccaatgatgtgggccaacttgttctgggtttgggggcatccggaagtatatattgttattttgccagctttcggtattttctcagagattatttctactttctccaggaaaaaattattcggttatccggcgatggttgccgcgatggcagttatttctttactaagtttcctagtttgggtccatcacttctttacaatgggatcaggggcgcttgttaactccttcttctccattacaacgatgatgattgcgataccgaccgggattaagatattcaactggctctttacaatgtacaaagggcgaataacctttacaacgccaatgctttggtcgcttgcctttatccctaactttgttgtcggtggggtaactggggttatgcttgcgatggctgcggccgattatcaatatcacaatacgtacttcttagtatcccatttccactacgtattaattgctgggacagtattctcctgctttgctgggcttacatactggtatccaaaaatggtcggttacagactaaatgaaaaaattggtaaatggttcttctggattttcgttgttggatttaacgtttgtttcttcccgcaatatttcctaggactagatggtatgccgcgtcgtatttacacttacgtacaaggtgatggctggacaacgcttaactttatttccacagtgggcggattcttgatgggtgtagcattcttagttctttgctacaacatctactacagctataaaaactctaaacgtgaagttactggtgacccgtgggatgctcgtacgcttgaatgggctacaagttctgcagttcctccaaaatataactttgctgttttaccagaatggaatgacttggatgatttctggaatagaaaacaaaaaggcgatccatatgtaaatgataaaaattataaaccaatccatatgccaagtaataccatggttgggtttgtaatgtctgtcttcttcttcattgcaggtttcggactagtcttctactggtactggatgggaattattggcctagttggtattttaggatgtatgatttatcgttcattccaaaataacgatggttaccacgttgaagtggacgaaattaaagcaacagaagaacataatgcgcgcgaacttgcgactggtgtgaaggagggtaacccatggaatctgtagaaacaaataaaaatctgccaattgaatatagatcagaacaaggtcgattaaatattcttggattctggattttccttggcgccgaaattgcattgtttgcgacgctttttgcgacttactttgttatgagaaaggctggctcgaatgcgggtcatccgccagcagaaatgttcgaactttggctagtactaataatgacatttttactattagcaagtagttttacgtgtggtctagcaattggtgagatgcgtaaaggcaatgtgaaaatgttgacgatttactcgattatcacattaattcttggtgcgggatttgttggctttgagctttatgaatttgcacactatgtgacagagggcgttacaatgcaaatcggttcttactggtcagcattcttcgttctactagggacacatggacttcacgtaacagtcgggattttctggattagttttattctaattcaaattaaaatgcatggtttgacgccaaaaacagcatcaaaagtatttatttccagtttatactggcatttccttgatgttgtgtggattttcattttcaccggtgtctatttgctagggatggtgaactaatatggcacaaaataataaatcaaatgcagctcatgctgaaggtggcattccttggaaacatattgttggtttcgcgctatcaattattttgacgcttctagcagtctgggtagccatttattcgacgcttacaacaaatgttaaggtagttattattttcatctttgcgttcattcaagcagccctacagcttctgatgttcatgcatatgactgaaggccgcgatggcaaaattcaaattggtaatattttattcgcagcatttattgcgattgtcgtagttattggttcatattgggtaatggaaattggccatatgaatcacttgttataatttaaaaaaggctggtatggaattcattttctgtaccagtttttttgcatttttaaagggattaacagctcttctaaaaaaattttaaaattattgcttgctatgtaatgcattacatattctatagtggagaagtaaaattatatccgtgagaggagatacacaaaaatgacagaatcaaaatttcctaaaggcttcttatggggcggagcagttgctgccaaccaatgtgagggagcttatcttgaagacggtaaaggactttcacttgttgacatccttccaacagtagaggatgggcgctgggaagctttattcaatccatcgaaagcgcttgctacagattatggtttttatccaagtcacgaatcaattgatttttatcatcgttataaagaagacattaaattaatggcagaaatgggattcaaatgtttccgtatgtccatcagctggccacgtattttcccgaatggtgacgaaacgacaccaaatgaaaaaggtttagcgttttatgatgcagtttttgatgaatgtcataaatatggcatcgaaccagttgttacaatcaaccattttgatactccgcttgaagttttcaaaaaatatggtggttggaaaaatcgtaaatgtatcgacttttacttaaatttctgtgaagcaattttcacgcgttataaagataaagtaaaatattggatgacatttaatgaaatcaacatgattcttcatcttccatacattggtggaggtttagacgttactaaagaagctaatccagaggaagttaaatatcaagctgcgcatcatcaattagttgcatctgctttagcgacaaaacttggtcatgaaatcaaccctgaaaatcaaatcggttgtatgcttgcagcgggtaacacgtatccaatgacttgtaatccaaaagatgtctggaaatctatcgaggcggaccgtgaaggctacttcttcattgacgttcaagcgcgcggatactacccaagctacactaaacgtttcttcaaagaacacaacatcaatatcaaaatggaagatggcgacttagacgcattacgcgatcacacagttgattacgtggcattcagctactattcttctcgtctaacaagcgcagatccagagaaaaacaaagaaacagaaggcaacgttttcgcaacactaaaaaacccatacctaaaagcaagcgaatggggttggcaaattgatccactaggtctacgtattacaatgaatacaatttatgaccgctatcaaaaacctcttttcatcgttgaaaatggcttaggcgcagtggatacagtggaagaagacggctctatcaatgatgattacagaattgactatatgcgtgaacacgttcgcgaaatgggcgaagcaatcgaggacggcgtggaacttcttggttatacaccatggggctgcatcgaccttgtcagcgctggctctggcgaaatgaaaaaacgttatggcttcatctacgttgaccgcgataacaaaggcaacggaaccctaaaccgctcgaagaaaaaatcattcgactggtacaaaaaagtaattgaaacaaatggtaaagatatcgactaggatatagtaaacccccactttcggtgatgaaggtggggattttattttaatatgaaatcgcgcgttttgcttgtttactccaacaagtattaaaataactttgcgaaattcgcgcatttttttgaccagaccagctgtcgttatagtaaaaattgtttttatcataaccggtaatggtgatcgcgtgaacggaaaaaccatggaaattactaacccaagctacgaccggacgttttttattcaactgatttttaataccagctaaatttgtcccagtcatattcttcgcgctgccagtatattttttcacttgatttactaaagccggtggataaatcgtccagccacttttagagaacggattcccaacaaaaccataatttggattggatttatgtcgcttcatttcttttgcaagcttgactttatcaacatttttcccagcatagcgcagcatcatcgcaatattagtaatctcacagcccgttggtaattgtggacgctgaacaattaatggcacgttcatttgtacaatttttggcgttgatggcgctggtgtaggtgcagcggttgcggcttttacatatttcccagatacatagccatttttccctttaaaactaaagcgataccagttgttggatgtttttgcgattgctttaaatttagtattatttttaagccaaccaataactttcccagatgtcgcattagttgaacggacattaaggcttgcggttgttaccatttgtttattaatcacagtttctttcgccgctgcctgaccggtcgttgctacactaaatacacttaaaactaacccaagaacaagtatccatttcccccatttaccaaaaaaagtccccattatatccccctctgattcagattacttatttataccctatttttttaaaatgaaaagaaaacgcttgcataaatagaatggccgtggtactatgaaaatgaacttaacgtgttaaccggttattagtataaagttcagtgatagcaggcgaattcaagtttgcaatcaaaaatgtatcatggtaccattaacctaaaacttaacgtgttaacgcgcgggatgctttagggggaaattgttatggcagaaccaaaatacgctattataatcaatgatattaagcgattaattagtgacggaacttttaagccaggagaaaaaatttattcagaagatgaactgaaaaagaaatacaatgttagtaatactacagttgttcgcgctttacatgaattagtaagagctggaattttagcgcgttatcaagggaaaggaacctatgttagtaaatctattattaacgaagaagttatttttaatgaatatacgaccgttcctaatggtaaattcaaccgaaaaacaaaaattgctaacgagcacacaaaagttgtagctattaatgaaattcaggatgcgagaattgccaaaaacttgcaaattccacctgaaaacatgattgttcattttcaacgaattcgtctgattgatgatgtgccttggacagtacaaaacaactatatggcaaaagccaatttgatcaacgtagatttaaccaattttgaaagatttaattctttatcagaagtaattaaagagctttatggtattaatattctgcacgaagcgatgaaagagcgaattcaagtcgaatttccagtaaaagacaaaaataattttaaattactcgaaattgactccgaactaccgctttaccacattgaaagaataacttatgtgccagaggggcaaccctatgaatatattgaaagttatttacggcataatttttactctattgaaatcgaaaagaaaaaacaatagaagggagttaattacttggattatattatcgcagcacatggccggtacgcgcaggaagtgaagaatagttgccaaatgattactggccaaacaacgaatatcaaagcagttacttttactgaagaaatgggggtgaaagatgtattagaagcatacgcggcagtttattcacctggaaatgaaaccgctatcattgtggatattgtcggtggaactccgtgtaatgccgcgcaaatgtttcatgcaaaacacccagaagtgaaggttgtgtctgggttgtcactcggattaatcattccgcttagtctaggggaaactttagaaggagcaatgcttggcgcgcaagaaaatattcaatttgtggaattaaaagtaaataatacgataataagcgatgatggggaggaagaggactgatgggaagtaacggaatcaaacacgttcgcgtagatgaaagactaattcacggccaagtagcgacaatgtggactaatacaataaaagcaactcgaatcatgattgttgacgatgccgttgtaaaaaatgacatggaaaaaattgcgctaaaaacagcagtgccagctggggtaaaactaagtattttgacagtaaaaggtgctgcaaataatattaataacgataagtacgtaggtcagcaagttttcttaatcgtaaaatcgccacatgcacttcgcggtttagtggatgcgggtgtagaacttccccaaatcaacgtaggaaatatgtcaaccaaagcaggaagccgccaagtcaaaaaatcagtaagcgtgacagatgaaaatttggaagattttgattatttggctgaaaaagggattaaaatcaccgctcaaatggtgcctagtgaggatgcagttgattttgcaagtttattaaaaaaataagtaataagaagggagaactacaatggatttagcggtttggcagattatattgttagttatacttgcggcttgtaccattcttgatgctttaactttagtaataggacttaatttccctgtaataacagggacacttgctggaatcattatgggtgacatggtgctcggacttgcaattggggcaacgttacagctgatggtgcttggtgtcggtacatacggcggcgcgtcgattcctgactttacaacgggagcaattgtaggaacagtatttgctgttttatctggtcaagatgcggaatttgcgattggacttgcaattccagtggggcttttaatggttcaattagacattttagcaagatttacaaatacatttttcttacatcggattgattctaatatcgcttcgggcaacatttcggcggtaaaaaggaacatttggtatggggcgctaccatgggctttatcacgcgcggttcccgtatttatcatgttgactttcggacaaagcgtggttgattttattctaaatgaaattccagaatggctaatgggcggtcttcgtgtagctgggggaattcttccagtagttggtatcgcgattcttcttcgttatttgccaacaaacaaattcgtcgcctatttaattatcggttttgtagcagcggcttatttaaaagtaccaatgctaggtgtggcgctaattggcgtggctttggcaatcatttacttcaaacaaaatttcaaaaatccagtggctgccggagcaaatggtgcagcgctagttggggaggagaatgaagatggcgaatacgaagactgaacatgattttgagaaagtcctcaaaagacgcgatttaatagcagcaaactttcgttggttgtttgccagccaaatctgttggaactatgagcgaatgatgtcgactggttatctttatagtattttgccaacgcttcggaagctttataaaacagatgatgatttaaaagatatgatgaatatgcacaaccaatttttcaatacgaatccgatggtcggtggtttgatcttagggatggatatggcgattgaagaacgtgaaaagaaagcatccaaagaagtcgtaaccggcttgaaaactggattaatgggaccgtttgctggtgttggtgatacgattttcggagttattttaccaaccatttttggatcaattgcagcgtatatggggcttcaaggtaatgtgacgggtgtagttatctgggttttagttaatattttggttgtaggagctagatttaccttactaccacttggatataagcaaggtgcgaaattggtaactgaatttgcagaccgacttaacgcgttaaccgatgcagcaatattactcggtgtcacagtcgtgggagccctcataccaaccgtaatcaaagcaacggtcccattcgtttataaatcaggaaaagtagaactgaaaatgcaagacatgctcgatcaaattatgccttcactggtaccagttttacttgtagcgctaatctatgcacttttaggccataaaaaaatgacatctacgaaggcgattttattagtaatggttattgcgattattttattcaacctaaaaattctaggttaaaatataaaaattggaggaatagacaaaatgggcttaacattttttgacaaagcgcgtgaattaacggaagaactagaaaaaacgcaggcagaaaacattcatcaagcagcgaaattggtggcggagagcattatgaatgagggtattatccaagctttcggtagtggacattcttatgcagcggcgattgaagtttgtgggagagcgggtggacttattccgtcgaaggttattatggatcccgcgggtggatactatgaatctattgagggcgttggatcattattgactcataggttacaagcgaaaccaaacgatatattctttcttatatctaactcaggtcgcaatccaatgggaatagaacttgccgaatggattaaggcacagggttgtaaattgattgttgtgacagcgctcgatgcctcgcaaacagcagcctcaaggcattcttcaggaaaactgttgtatgaatttgcggatgtaattttagataatcgctcggttcaaggcgacgcggcacttgaattagatggcttagaaggaaaagtttgtggaacatcgtctttctccgccgtattacttcttcagcaaacgatctatgaagcggtagagctgatgcttgaaaaaggctatactccaccagtttatcgtagtgctaatattgatggtggttacgaatacaattttgcgattgaagataagttcgctgatcggattttccatttataataaaaacacgcgcgaaaatgaacgttgttttcgcgcttttttggaggctatatgatggttttaaaagaggcttgtattgaaaacactactaatttagaaggatttattgcagctggggcgaatcgaattgaactttgcgataatttggcagagggcggaacttcggttagttacggggttgcgaaacatgtggtggaaatttgccacgaacaaaatgtaagtgtaatggcaatggttcgtccccgaaaaggcaattttgtttatacaaaagaagaaatttcgattatgattgatgatattttgatgtataagaaattgttagctgatggcgtggttttcggctgtattacggacgcgggattactagataaaccagccataaatgaattattgaaagctgcaacaggtctggaagtaacttttcacatggcgtttgatgagttagtagaaacagaaaaattaccggcaatagactggttagctgaacaaggtgttacgcgaattctcacgcacggtggtgacggagctaaacttcccgaagaaacttttgttcattggcgaaaatatattgattatgcagcgggacgaatcattattttaccaggtggaggaattaaatcgcacaatctggaatggattacaaaagaaacgggagcggctgaaatacatggtacagacttgtttggggagcgctaaaactccccaaataaaaaaaatttaaaaaaaggcttgcaaccgttttctttatatgatatatttatctcatcacaaaggattgttaccaattcattgggcaaaacctaagctgatttgtaggacacgtgtatacgtgaagtcctcgaatgagcttaggtttttctttttgcccaaaaaaccaaaaagaggaaggaagtcgtcaaaatgaaatatgaacagttagcaaaagacatcttgaaaaatgttggcggaaaagaaaatattaatagtgttttccattgtattaccagacttcggtttaaactgaaagatgagaatattgcgaacacaaaagaaattgaaaagcttgatggagtaatctccgtaattaaaagtggtggtcaatatcaagttgttattggtaaccacgtaccagacgtattcaaagcagtattagaagttggtggtatttcagctgaaggagacgatagtaatgttccggcaagtggtaatatcttcaaccgttttatcgatatgatttccggcgtatttacaccagttctaggtgtattagccgcaacaggtatgattaaaggtttcacagcaatgtttgcagcatttggttggattacagttacttcaggtacttaccaactactttatgcaattggggattgtttattctacttcttcccaatcttcctaggtttcacagcgatgaaaaaattcggcggaaacatatttatcgggatggcaattggtggtgccctagtttatccaacgcttgcaggtatttcagcaggtgacccaatttacacactttttgcaggaacaatttttgaatctccaattcacgtaactttcttaggaattccagttatcttgatgtcttatgcatcttctgttattccaattattttagcaacatattttggttcaaaagtagaaaaaggcttcaagaaaatcattccagatgtaattaaaactttcgtagttccattctgtacactattagtagtagttccaattactttccttgtaatcggaccaatcgcaacttgggctggtcaattacttggagcaggtacaatttgggtttataacttaagcccagttgttgctggtttaatcttaggtggtttctggcaagtattcgttatctttggacttcactggggtcttattccagtggcaatcaacaacttaacaacgcttggatcagatccagtacttgcaatgatgttcggtgcttcttttgcccaaatcggtgcagtattagcagtattcttcaaaactagaaacaaaaaaatcaaatctcttagtattccagcatttatttccggtatctttggtgtaactgagccagcgatttacggggttactttaccactgaaaaaaccattcatcatgagctgtatcgcaggtgctgttggtggaggaatcattggttttgtaagtgcaaaagtttatatcatgggtggacttggaatcttcggtcttcctaacttcttccaaccaggtgctggtattacaagtgcattctggtgggtagttatcgcaatcgttatcagcttcatccttggtttcatcttaacttatgtagcaggattcaaagatccagctgaagcagttgtagaagaaactaacgtaacagagggcgaaactttaatcgaacgtgagacaattccagctccagtagttggcgaaatcgtaactttagcagacgtaaaagacgaagcattttcatccggtgcacttggaaaaggtgtagcaattatccctactgtcggacgcgttgtagctccagcagcaggaacagtaacaactatcttcccaactggtcatgcaatcggtattacaacgaatgacggtgcagaagtattaatccacatcggtatggatacagttcaactagaaggtaagttcttcacagcacatgttaaacaaggcgatgtaatcgaaaaaggtcaattactaactgaatttgatattgaaggcattaaagcagctggatatgatgttacaactccagtagtagtaacaaactccaatcaatatttagacgtaatgattacagatgcaaaagaagctaaactagaagaacgtttaatcacattagtcatctaaaattcattaataaacagcttgggcgtaaatctgctcaagctgtttttatgttatactgagggaaaaataggcggtgagcggatgttagcaaagggcgatttaatagggatcatttgttgttctgatggtcggaagaaagaagaagagaagaatttgaagcgccttaaacaagtcttagaaaaggaatttggacttcaggtggtttttgcgaaaactatttttcaaacagatgattcgccttttagtggtactcctgaggaacgagcagccgaattaatgaaactatatcaaaatgtggatgtaaaaatgatttttgacatttcaggaggggatgcggctaatcaagtattaccatatcttaattatgacattataaaaaaagcagccaaaccttttattggctatagcgacttaaccgtaatattaaatgcaatttttgcgaaggcgaaacaacctggctttaattatttactgcgaaatttagtaagtgaagctagcgagatacaacgagtgcaattccaaaaagcgtttttcgagaatcaaattgcgataaatgggaaatcccttactgattttgaatggagcgtgggtgaggtcgttggtggaaatatccgctgctttttgaaactagcaggaacggaatttatgcctgatgtctcgaataaaataatttttttagaaagtttaggtggaaaagaggcgaaaattgcttcttacgtagcgcaattagaacagttagatgtgttttcgaaatgcttaggaatagttgtgggagaacacactgaggctgagaaaaacggagaatacgacagaataggcatcttatatcaacagattggattaaaatataagttacctgtttttcgaactaaggaaatcggtcatagtgtcgaagcaaaaccatgcctaattggagcaaaaattaatgtttcacgtgaaacattaacaaatttttaatatttttattgcgaaatgttcataattaacctttaatatagaacttgtaagcaaggaatacaattagttttactccctttttgctaattgtagaattccttaaaatcctaaactccctttttggaccgacttgattgtcggtctttttttaattctccaagctgaaaactattcaattttttgttaaaatgataacataaaagaaaatgcgtatgaaaaaggagtttttatcatgaaagttgaaggattacttggctttttaggggcggcaatgggtattggatttagtttgatggttcttattattcctgatatttcacaggctttagaagaggaatcgtttttcttctatatgttaacaattggttcgcttgtgctttcaggggtgggacttgcaggatcgtttgttgtttcgcataaaccccgtcttggtggagcaatgatggttgcagctgcaattggttgtacaatgtcgatttccatcatgttcttactaccaatcgtattacttgctgttggtggattaattgcactaattaactatgaagaagctgcttcagtagaagaataaatgaaaaaaagctgtccacgtgggcagctttttttattaacgattaagatatttttttaaaaagtaataaattccgtcagcatcatttgcagtagtaacaaaatcagcgctttttttcactaattcactcgcattttccattgcgactccagcaccagctacttcaagcattccaatatcgttttcaccatcaccaaaactaataacattttctggtttgatgtctaaatgtgcagcgaggtttttcacggcatattttttatccatatctttgggcaaaatttcgatattatttgcatgagaagaaagaatagaaacatcagatagtttttctaattcgtttcgtaggattgcaagtttatcgaaatcctcttcttcaatgacaatgccgttaatgaactgattagcatgctccaagaaggtttcttttgttttaattgcaacgagttttgttgcatttacgcgacctttatcttcttcatcggtaaaataataaggtggatttttagtgtagtaaaccgtgtcagtcgagaagaaaaacactggtagatcatggtcttggcataataaaaatgtttctagtaatgcggattgtttcattttttcttgttggatgatttcgccggaaactgccactacgccaccatttgaggcaataacatctgcttttggatgaaccagtttggcgaagtcggttgcggaattatacattcggccagtagaaacggcgaaatgatgaccttcttctattaattgttgcagtaaccctagtgtttttggtgagattgtttgattttttagtagtaatgttccgtctaaatcagaacaaattaagtatttttccaagtaaaccttcctttcattatagcttggaaccgcatgattcgcggatgattaattctggattatgattaattatcatcggctcaacttgaccgttaattgcgctaatcaattgcaaaagtgccatttttccaagatattcattgtgttgatccattgaagttaagcgcggggtttgataatcgccattcataaactgatcgcagctgacgatggcaatgtcttccgggcaagaaagtttcgcgtcattaatcgctctaatcgccccaattgcaacattatcattgattgctacaagtgcagtgggtaaagtagtgttattttccagaagtttagtcatcgccgcgtaaccatcagctgtatagtagtcagaaagaacaatccaatcttcattaaccgaatgattgtaactagccatagcagccttaaaagattccaatcggtaggaggtgatttttacaccagcttccccgccaataaagccaatatttttgtgatctagcgctgtcagatggctaactaaagttgttatgcctttttttaaattacgttcaataaataaacagttaagttcgggaatttttgaaccaataacgacaactggaatttctctatttagctgatttaaagcattgatgtagtcttttgaaacaacttctttatcaatttcgccacctaaaataagtaatccatccacttgtttttctaaaataatttttaagtaatcttcttccgtcaaaggatgtttgctattcttattatttggctcggcaagcatcgtattgaataaaattgtcgaaaacatgtaatctagcgcgaatttttggatttgcgttatgagtgaaatgaaataaggattggaaatatccggtaaaattacgccaatattttttgtttgtttattgaccattccacgcgcaaatacgctaggtgtgtaattgtgttcgtctatgattgcttggattttcttgcgtttcgctgctgaaaccgaggggctgttattaatcactcgtgagacagttgaaacggaaacgccactaagtttcgcaatttcttgtatagttatttttttcattaggaatattcacctcgtaagcgtttttagctattttaagtgtagcttatttggatctaaataacaagtgaaatttggtaacgttatcaaaaataaacaaaaaagtgttgacatattaaatttatccggttattctatgttagaaagcgctatcaacaaacgttttgatttggtaacgttaccaaaaatgaggtggaatagttgaacatacaagaatctgtcatcggcattgatctaggtggcactaaaattttaatcggtgaagtaacaaaagatggggaggtgctgcggtccaaaagctacccgagcaatactgaaaatcaagccaaagcggtagaagttctgctaaatgcgctagatgattactcggaaaatattggttttatagcaacgaaacaaattgggatcggtgttggcctagtagggcgcgtagattataaggcgggcatttggctggaaatcgaaccaggaaaaacaaatccgacaccactagcagaaatgttagaagcgaaaacaggattgccagtgaggcttggtaatgatgtagtttgcgcaacaatggctgaaaaacaattcggttgggggcgagaaacaaacgattttatttatttaaatgttggcactggtcttgctgctggatttgttgtagacgggcgcattacgcaaggcgggcactttaacgctggtgaaattggtcacgccgtagtagatattcagagcgatgtactgtgtggttgtggcagatacggctgtgtggagcgtcttgcttctggtcttggaataaaagaagaagcgcttagacatttaaatgaataccctacatccttacttgctgatagtaaaacggaattaactggaaaaatggttcttcatgcagcagaacaaaaagatgaattggctgaaaaaatcattgataacgccacgcttcagctagctaatttgattatgaatatggttcggacgacagatccagaatgtgtcattctaggcggcggcgtgacaagaaacgagcattttttccaaaagataaaagctaatcttcaaagtaatacaatccgttttgttacgaaaggcgttgttcgttcacaacttgagaaggataaagttggcttaattggggcggcagttattggaatgagactaggaaatgaaggaggacaagaatgaagccgaaaatgaagcaacaaattgtgcaaacaggtattattcatcgaccacttccaattgaaacggaacatgcgctagaaacgatagcgaaaaagaaacaagttttatcaagtagaacgttacttagctctgaaaaacaggtttccttagattttacacatcaaggcgctggcgattttgttatatctgatcaaggtgagattaagttgacttctccagttgttatgccacattggccagcaggtgcgccagatgacggtgactacaccaattttggtaacgttctcatatctgcgccactccaaaatgaggattggaacagctttaaccgcgtgagaattcaagttttcccagattttcctggtgtaacgaatccatatttaatgattagctttaaaaatgatggaaccgtgaaagtacctgatatatatggacgtgaaggcgttcatggcgtgaatttaatcaaccatgaatggaacgatgtcatttttgaaattgaaggattgccacgggataaaatgacagaaattagttttagctattatttgaatggcccagagcgactgactgctggaacaatggagttattcattagtgagattaaactagagcaaatcagtgagccggaaatctccaagggctggattccgcaagataattcgctaatttattcccacaacggctacacaaaagacatgcccaaaatagcgttttgtgccaataaacttgaagcgaattcctttacaatccacgaaaaagaaacaaataaagtcgttttcaccggaaaagggtaccaaaatacaaccgaaactggcaatttcattattcttgatttttcagatttacaaactgtgggtgagtattatttgaaatttgctgagatgcaatcggaactattccaattcgggacttccgaagtgatttgggaatcttctatctggaaatcacttaattttattttctgtgaacgttgtggttgcccgatttttggaaaacatacgacttgtcatgcggatattatcgctgaacataatggaaaacagctgtcattcaatggtggttggcatgacgcgggtgatgtttcgcaacaacttattcaaacggccgaagtaacgatggctttatatgaaatggctgcgagtttatctgaaaaagatgaaatgttacggatgcgccttttagaagaaggtgagtggggattagatttcatattgaaaacccgctttggagatggttttagagcgacaagtgctgggatgacacggtggacggatggccttgttggtggcatggatgacgcaatcgcgcgggttcataatcaagcttatgagaatttttactgtgcggggattgaagcgtatatcggcagccaaatccaggataacgccactatgcagaatcatctactacgaattgcggaagaagatttactttttgcgatagcggaacttgaaaaacatggaactgggcaaaaaccgattttctgggagcatacgtatcaaacctcagaaagtttgtattacgcaacggcttcatgggcggcttcgatggtttatcaattaacaaacaaagaaatatacgcagaaaaagcagctgagtggttggatttgatgttagaagcacaagaaaaaactgggattaaagacagcgaaactagcgaactttacaaaggatttttctaccgagataaaacgcacaatgttattcaacatttcaatcatcaagcgcgtgaacatctttatttgatggcacttgaggtggctcttgaaacgcaaccaggtcacgctgaaaaacaaacttggctacaagcggtcgaaatgtacggtgactatttgaaaaaagtaacgcgtttcactaaaccgtatccgctcattccagccggactttacaaaaaagacgagtatttagacgaagcaagttttcacttacaacatttactcattgatgaacgagcgatagaagaataccaattacaattcgaacaaggtatcaaaataaatgacgagattgcgttgcggaaattcccgatctggttctcgtttagaggcaataacgccattttactttcggcaggaaaagcggcatcaattgctgggaaaattttgcaagataaggcgctgttaaatattgcagaaggtcaattgcagtgggtaataggaatgaacccatttggacaatcaatgatgcacggcgaaggttaccgttatgcgcagcagtatagtgtgcttaacggcgaaatcacaggggagataccagtcggaatggaaacctttagaaatgaagatgaaccatactggccggagtttaataatgcaacttataaggaagtttgggtcggtaatgccggcaaatggatgtcaattgtagcggatttaaacaaaataacaggaaagtcataggaggacaaaaaaatgagttcagagagaagtttatctagtcggtttattgaaggattatcaatttttgcccaaaaaatttcatcgcaaaaacacattatggcaattcgtgatggctttgcagcaatgattccgattacgattattgcagcatttttcttacttgtaaataatgttttgcttcaaccagagaatggtctgcttaaattcattccaaatgtagaaaattatttgggtgtaggtgtgcaagtttataatgcgacacttggtattatggcgattttagcggcgtttctaatcgggaactttttagctaaatcatatgggatggaaggtcgtacggaaggaatggttgcagttgcagcttatgtagtcttaattcccgcatcttcgcacttaatgtctgttgacggaaaagcgtttgaggctggcggcgttttaacacaagaaatgacaagttcaactgggatgttcctagcgattattgcttctttagttagtattacaatgcttgcaaaattctcaaaaagtaaaaaattaaagatttccatgccagaaagtgttccaccggcaattgcaaaatcatttaacattttaattccatctttcttagttctaagtattttagcaattattgaagtgcttgtagttagttttgtatcaatgagtattccagaaattatcgtaaaagttctacaaatcccactagtaggcggtttccaaacgttaccaggtattctactttatgtatttttagcgggattcttatgggtatttggtattcacggcgcgttcgtactaggcgcaatttcagggccagtactattaacttccttgcaacaaaatattgatgctgtcaatgcaggtacagctttaccaaatattgttacacagccgtttttagatgcgtttgtttatatgggtggtggcggaacaattatctgtttagttatcgcgattttcattgcctcaaaacgaccagatcatcgcatggtaacaaaatttggcttaatccctagtattttcaatgtcagtgaaccacttatgttcggtttgccagttgtattcaacccgatttacggtattccgctagttatcgcaccacttgcttcaacagcaatggcgtattttgcaacttcatggggctggattagccaaacgtacatcttgattccttgggtaacaccgcctgtcctttcagggtatcttgcaacaggtggggacattcgcgcttccatcttacaaatcgcaattatcgtcgttggaacgctcatttacctaccatttgtacttgtagctaaccgcgcgtacgttttagaacaaaaagctgctggaaacgttgaagcagaaacagtaacgaatggagaagtttaaatgaaaccaacaatgatgacttatattaacgaagaagaggaaatgtgcaaatcaattttagctaatttccaaaaaaatgcagaacaattagaagctttagtaaaaaatggcgcaaaagaatggctgattttagctactggatcaagtttgaatgcagcccaaagtgccaaatattacattgaaaatctagctgatgtacgcattactattgaagaaccattcaatcatctctattacgaaaaattatcaagtcacctagatttagttatcggtatttcacaaagtggtcagagcacatcgactatttccgcgctagaacgtgtgaaaaaagaagcttccgtgccagtagttgcgctaaccagtgatgtaacaagtgaaattgccgagtttgcggatataacacttgatataggttgtggaaaagaacgagttggttacgtaacaaaaggcttcactgcaacagtcttgacattaatgctaacaggccttcatttcgcttataaaacggcgcaaattgatgggactcgttttaataacgaaattagtgcattcaaccgtgcaaccgacgccatcccagaaacaattgcccaaaccgaagcattttatgaaaaatggaaaaatgaatttgcttcagcaccaaagtttactgcgattggttatggtccaacagttggaacgtgcaaagaatttgaaacaaaattctcagaaacagttcgtgtaccatcgcaaggtcttgatttagaagcgtttatgcatggcccatatttagaagtaaactcgcagcatagaattttcttcatagaaacagaaagcgcagttacagaacgattagtgctgttacgcgattatgaatccaaatacacgccatttacgtatactattaagtttggtacagctgagaatgaccgtacgctagcgattcccgctgagttggatgaatttcaagcaccatttctaatgattcttcctttccaaatcttagctcatcacattgcagagttgaaagggaacaaattaacagaacgtatctacacagactttggcgtagcaatgaaaagtaaaacaaaacctggagactacgcttaaaaattactaaaagactggaaaacccgaagtaagtaggggttttccagtcttttttacacactgcttcctgaatttcgtaagtaagagaaaaggcatttaattattaaaaattgataaataagtcacaagtctgatacacggagagttaacttgtggtaaaatggactttgacttttaaaaaagaaaaggaagtgagtgcctggtggattttattacgtacatcattgattttattttgcatattgaccaacatttagtggagattataaacaattttggaatttggacttacatcattttgttcttgattgttttcatagaaactggcctagtagtatttccgttcttaccaggggattcattgctttttgcggccggagcattatccgtattagatggttcaatcttacatattgttcccctaatcattactttatggttagctgcggttctaggtgacacagtgaactaccatatcggtaaaaaaattggcacatcgataccagaagatagctggtttggaaaactaatcaacaaagaaaagatggaaaaagcagaggcgttcttcaataaacatggtggaaaaacgattttcattgctagatttatgcctttcattcgtacttttgcgccgttcgtagctggagcaagccgtatgaattatcgttatttcttaaattataatattttaggagcgactgtctgggttctactttgtacacttgcaggctacttctttggtaatttcccaatcgttaaagacaacttctcattagttgtgatcggaatcattgtagtttcagtaattccgatggtagtttcctttattagaagtaaaatgactcaaaaaaacgcggattaatttccgtgttttttttatttcccgggaaatgtataaatgataagttttggggtaattgtttaggaagaggtgatagaaatggaaaatggtttaaatattacatccgaaattggtaaactgcaaaccgtccttgtaaaaaggcccggttctgagttggaaaatatcacgccagaatatctagagtcgttattattcgacgacataccttacttaaaaatgatgcaaaaagaacatgatttttttgtcaaaacgatgcaagactcgaatattgaagtactctacttagaaaaattagcagcagaagctttaaaagaagctagtaataaagaaaattttttaacaaaaatgattaaagaatccaatcaaatggatgaaagtgctctctatgtacgtgattatttgatgtcttttgatgaagaagaaatgattaaaaaactgatgtccggattgaaaaaatcagaaattccagaacgaaaaaagaaacatttaaatgaaatgatggacgaacaatatccgtttttcttggatccgttacctaatttatattttacacgtgatccggctgcagtcattggtagtggtgtaacaattaacaaaatgttccaacctgcaagaagacgggagtccctatttattgagctcattttaaaacatcatcctcgttttagtagtcaagaaatcccgatatggtctggtcgagaagagcctttcccattagagggaggagatgagcttattttgaatgaggaaacggttctcgttggtgtttccgagcgaactgatgcgcgtgcggttgagcgcctagcagaaagtttgtttagtcgcgctccaaaaatcaagcgagtactggcagctgaaataccagaaacaagatcatttatgcatttagatacagtttttacaatggtcaattttgcgcagtttacaattcatcctgctattcaaaaccagcaaggcgaactaaatgtctatattttagaaaaaagtgagaacgggctagaaattactccgcgtagagattttaagcgagtgattgccgaagttctaggtgtgccagaagttgattttattccttgtggcggagaagatgtgattgtttcagcgagagagcagtggaatgacggcgctaatacgcttgcgattgcgccgggagaagtaattacatatgatcgaaatcacgtatcaaatgaccttttaagaaaggctggtattaaggttcatgaggtaattagctcggagctttctagggggcgcggaggtcctagatgtatgacaatgccgataactaggggaaatctaaaataagctttgaaaaactggtatttcccctcaaaatacgactttcacaaaaagtatagtcgctgtttttaagatgtgctatagtgttttcaaaccagaaattttcgagaaatatcttgctggttagtttgcgctatgatataatattttattgtgagtaattataaattattccttgctcgctcttgattttaaggcttgctaaaggcagtctgaatttcagggatatggtgtgattacataccttatcagagccgcttaagaccacaaggaggtgtagagtagatggctagaaagtacgaaattatgtacattattcgcccaaacattgaagaagatgagaaaaaagctgttgttgaacgctttgacggaatcttaactgaaaatggcgcggagatcatcgaatcaaaagaatggggtaaacgtcgcttagcatacgaaatcaatgactatcgtgatggtttttaccacatcgtgaaattgaatgctgacaaagcagattctatcaacgaatttgaccgtttagcaaaaatttctgatgatatcgttcgtcacatggtaattaaagaagaagcataagaatttattcaaggctaggaccttgatttactaaacgagaggaggttggttttgcatgatgaatcgtgtagtacttgtaggacgcttaacaaaggatcctgaattacgttacactccagctggtgtggccgttgcgacttttaccttagctgtaaatcgtacgttcactaaccaacagggagaacgagaagctgactttattaattgtgttgtttggcgtaaaccagcagaaaacgttgctaatttcctgaagaagggaagcatggcaggcgttgatggccgggttcaaactcgtaattacgagggaaacgatggcaaacgtgtttatgtgacagaaattgtagctgagagtgttcaattccttgaaccgcgcaattctaatggcggtggcggaaataataactatcaaggcggaaataacaacaataattataataacggtggaaataacttcggacaagcacctactaataacggtggattcggacaggaccagcaacaatctcaaaatcaaaattatcaatccactaacaatgatccttttgcaagtgatggtaagccaatcgacatttctgatgacgatttaccattctaaattcattttagcggtttgaactttaagataggaggaactttcaatggctggaggacgcagaggcggacgccgtcggaaaaaagtatgttactttacttccaatggtattacgcatatcgattataaagatgtagaacttcttaaaaaattcgtttccgaacgtggtaaaattttacctcgtcgtgtaactggaacaagcgctaaatatcaacgtaaacttactgttgctatcaaacgctctcgccaaatggcattactaccatttgttgctgaagaaaaataagttaactattaacagtctagaatttatttctaggctgttttttgttaaatggagactttatgcggaggaaacttagggcttaagttggacgtttagcatcttacattcatgttattcttaaatagaagtaaaaaaatacacagggggcaacaaaaatgtataaaaaattagcaacagtaggggtggcagtattattagtaggagcactatctgcgtgtagttttaatgatgataaggatacttcttcaagtaatagcagtaaagaaactactagtagcaaaagtaacaacgataaaagctcatccgatagcttgcaaaataaaagcttcgatatgagttatgaagacgcggtgaaagcatttaaagataaacatagtgatgcagaaatttctagcgttgaattagagaaaaacttgggaaaatatatttataaagtagaaggtatctcaaacgataatgagtacgaaatgaaatttaatgcagaaacaaaagaagaattagctgacgaaaccgataaattagataaagaagatacaggtggagtagaaaaagaaaacgaaaaaatcagcttagatggaattaaatcaccaaaagaagcaatggacaaagccgttagcgagcaagcaggcgatgtaacaagttggaaaatagaaagagaattagatacaacttattatgaagtaactgtaaaacaaggtaacaataaatacgaaattaagttaaattcaaaaacattagatgtcttacaaacagaacaagatgactaaaaacacgaaaagttacctgtgattattctttcgcaggtagctttttttatgaataatattactaaagttaaaggttaatatagtcttttgttactattcagaggtactttttacacgtttgaaaattctgaaatgtatccaaaaaatcggcatttttgctgtttttgagtcgttcatgacaagaatcggacatttcattacatttttggttataatggctaaattcgttgtaaaatgttagtggaggtgaattagttgagtaattttactgcaaaagtacctttgtcagaaagaatggcggatgttttgatttcaaaagatcgctggaaagatgacgaagaaggttatttaaaagtaaaatatgggctggagataattttaattaacgtcatgaagtttgcaatcgtatacggtattgccttagtaacagggttattactgcaaacagtgacagtgcatctgtcatatttatggctcagacggtattcttttggattacatgcgaccaaaacattgaactgtacactaattagcttaacaatgtttgtgcttgcaccttttattttccaaaatataccttctaataattggattgttttaggcacatttgcatttatactactcaacatgtttttattcgctccggcagacacagaaagtttgcctttaatcggtgaagaacaccggaaaaaactaaaaagaaaagcgatgataggaacgctaattttaacgggaattgcgttactaataccattcgcagagatgaaaacattaatcatggtaggatctttgtttcaggtgataagtattaatccacttacttacaaactattgaaaaggaggtatcggaactatgaaaaatatgaataaatcagttggtaaattcctttctagaaagctagaagaacaatccatgaaagttgcggattcttctatgagtaaagcttgtttcatgtttgtatacgaaccaaaaagtccatttgtgaaaatgcaagaaaaaaacgaaaataaataaatttaaaactgtataacatcaaaattcatgctaaaataaaaagaaggcaaacttacatatttaaacatagatattttagacagtggaggattaatatgtttagtattttgatggcaattatacagataacgggtatttttatagcaatccagattttgacaaacaaagttttttcaattaaagagggattggttactatagcaattgctatgctagccttccctttatttacattagttcaatactggtcgatgatttttgtgttgattgtttttgtaagtgccttatattggaaaaataaaaatgtgatagtttcaggttctattacgcttgtggtcattattttgcttactatcagtgattctatagtaggttttattttagtaccgggcttgaactttaaatatgatgaaatatttaatgaattgttaccaacactaatttactgtgcgggaatgctggcgaacttgttggtattttcgtttattcttagaaaattgattgaaaaagttaatatttctagatttgttgaacatagaaaatatgcgtacattattttttctatcgtggctcttactgtcttagcgttctatatgaacatatatgcggggtcaatcgcaggtttcgatggatcagttttaaaaattaatacgcttatttttacaggatataccattttgttaatagttattgtgacggttgtgattaacactgcaaccaatgaacttaaagtacagaatcagaaggaacagctagaacagttacaggattatgttactacattagagtccctgcatagagaaatgcgcgtttttcgtcatgattatgtgaatatcctgtcaacgcttgtaggatatattgataacgatgatatgccgggtttgaagtattactttgaaaataatatcgtacctataaataaaacaattgaatctaacaactataaaatttctttgcttcaaaatattcatgtgattgaactgaaaggcttattggcggttaagttaatacgagcccaagagttgaaaattgatgcaattttagaagtagttgaaccgattgataagatttcgatggatagcatagatttatgcaaagttgtcgggattttactggacaatgctgtcgaagcggcactaacttgtgaaaatccagttattcgaatcgcgtttgtgaagaagggtgatagcattattattgtgtttgcgaatagcttgccagtaaatatgccaccgatttataaaatatttgaagaaggtttttccacaaaaggagagggtcgtggtttaggacttgctagtttgcgggagattatgaagaaatattcgcacgttgccttagatacaaaagtgactaatagagaagttattcaagaattagaaattatgtagaagaatggggatgattttatgctaccggtttttatatgtgaagataataggatgcagcgagaaaggttaacaaaatatattgaagactatataatggttgaacattttgatatgaagttggaactttcaacaggtgatccgtttgagttagtatcacgaatgcctagacatcaaggtatgggactgtattttcttgatattgatttaggacaaccggacatgaatggctttgaattagctcaagaaatcaggaaattcgatccacgcggtttcatcattttcattacgacacatgcggaactgagttatatgactttcacgtacaaggtggaagcgcttgattacattattaaagatgatattgatatgttgcatgaccgtgttttagcttgtatgaagcaggcagaagaacgaatctctaacgaccaagatatgcagaagtattttacctttaaagtttccgataaaaagattattcacgaacttttagacgatattttgtttttcgaaacagcgcctacgattcataaagtaattttacatggcaaaaatcgccaagtggaattttatggtaagttgaaaagcattgagaaaatgttggatgaatctttttataggtgccatcgctcgtatattgtgaataagaaaaatatccacgaacttgatacgacaaaaggcgtggtgaagatgtctaacggagaaaattgttatgcatcatcaaaactaattaaaagtttgagtttataaaagtggccttcagggtcgctttttttgtacgaacgtcagcttgaatttgatgaaatggggaaatataggtaaaataatagtgatgaattgttagttaattttatgttatgatatagatactcaaattcagacaaaaggtatgtaaaaaaatggggagctggatgaaatgtcaggctattttcaaaaacgaatgcttaaatatccattatacggtctgattgcagcgacaattattttgagcgtaatcacgttctttttttcgtggtggttatcggcgttagtagttgttggcggaattattcttacagttgcgatgttttactttgaatatcgcctaaatgaagacgttcaattgtatgtttctaatttaacgtatcggattaagcgcagtgaagaagaagcgctagttgaaatgccgatggggatacttctgtatgatgaacattataaaatcgaatgggttaaccctttcatgtccaaatactttgataaaactgagctaattggtgaatctttggaagaagtgggaccggaatttctggatgtaataactggaaatgatgaaaaaggaattatgtcaattgcttggcgtgagcatcgttttgatacgattgtaaagcgaaaagagcggattttgtacttatatgaccgaacggagtattatgatttaaataagaaatttcaagcgaataaatcagtatttgcggttattttcttagataattatgatgaatgggcgcagggtatggatgatagacgccgtagtgccctaaataacttagtgacatcgatgttgactaactgggccagggagcaccgtatttatttgaagcgaatttcgacagaccgatttatggcttttttgaccgaagaaatgttgaagcaattggaggaagagaagtttcaaatcttggaccgaattcgtgagcggacgtcaaaacaaaatattccgctgactttaagtattgggattggttataaggaagatgatttgattaagttggcagatttggctcagtcaagtttggaccttgctctagggcgaggcggagatcaggtcgtaatcaaacaacctgaaggaaaagttagattttatggtgggaaaacgaatccgatggaaaaacggactcgagttcgggcacgcgttatctcgcaagctttgcaagaactaattacgcaaagtgaccaagtttttgttatggggcatcgctatccggatatggacgtaattgggtcaagtctaggtgtaatgcgaattgctgaaatgaacaatcggaatgcttatgtggtcgttgaacctggcaaaatgagtcctgatgtgaagcgactaatgaatgaaattgaagaatatccaaatgtgattaaaaacattgtgactccacaagttgcgctggaaaatatcacagagaagagtttgcttgtcgtagttgatacgcacaaaccttcgatggttattaataaggaactgcttgattctgctacgaatgtggtcgttgtcgatcatcaccgtcgttcagaggaatttgttggtaatccggttctggtttatattgagccatatgcgtcatctacagcggaacttattacggagctatttgagtatcagcctgatttagaacaggttgggaaaattgaagcgacagcattactttcgggaattgttgttgatacgaaaaactttacgcttcgaactggttcaagaacatttgatgcggcaagttatttacgatcgcttggagcagatacaattttagtgcaacaatttttaaaagaggatataactacttttacacagcggagtcgtttagtggagtcgcttgaaatttatcatgatggtatggcaattgcgactggacatgaagacgaggaattcggcacggttattgcagctcaggcagcagatacgatgctttcaatggaaggtgtgcaggcatccttcgttatcacgctacgtccagataaattaatcggaattagcgcaaggtcgcttggacaaatcaatgtgcaagtcattatggaaaaactaggcggtggtggacatttatcgaatgcagccacacagcttaaagatgttacaattgcagaagcagaaaaacaattaattagcgccattgatgcgtattggaagggagaaacataattatgaaagttattttcttaaaagacgtaaaaggtaaaggtaaaaaaggtgaaacaaaaaatgttgcagatggttatgcaaacaattttttaattaaaaatggttacgcggttgaagctagcaatgcggctttaagcacactttccgctcaaaagaaaaaagaagataaattagctgctgaagaattagctgaggcaaaagctttgaaagaaaaaatggaaaaattaacagtggaattaaaagcgaagtctggtgaaggcggtagattgtttggttccattacatctaaacaaattgctcaaacacttgaaaaaacgcatggtattaaggtagacaaacgcaaaatggatctaccagaagcaattcgagctttaggacatacaaaagtgcctgtgaagctgcaccacgaagtaacggcaacacttgatgtacatgtaagtgaagaataatttttcttaagggagcgtaagacagtggataataatttccaggacagaacaccaccacaaaatattgaagccgaacaagctgtactgggcgcgatatttcttgagccgaatgcgctgattactgcttctgaaattttaatgccggatgatttttatcgaactggtcaccaaatcatttttgaaacgatgcttgatttgaatgaccacgggaaggctgtcgatgttttaacagtatatgaggcgcttgctgccaagggtaatttagaagatgcgggtggtttgccttatttgacggaattatccggtgctgtaccaactgcggctaacttggaatactatgcccatattatcgaggacaaggcgcttctcagacgtttaattagaactgctacccaaattgcaacagatggttattcgcgcgaagacgagctcgatatgcttatggacgaagcggaaaagagtatcttggaagtttcgcagcgtaaaaatgttggtgcattcaagaatattaaagatgtcctagttaaaacttatgatgatattgaaattttgcataatcgtaaaggtgatattactggtattccgactggatttaacgagctggacaaaatgacagctggatttcagcggaatgatttaattattgttgccgcgcgtccttccgttggtaaaacagcattcgccttaaatatcgcgcaaaatgttgcaacgaaaacagacgagaatgtggccatttttagtttggaaatgggtgcggaacaacttgttatgcgtatgctttgtgcggaaggaaatattaatgcgcagaatttacggacgggtgctttaacgagcgatgattggcaaaagctgacaatcgcgatgggtacactttctaattctgggatttatattgatgatacgccgggtgttcgtgtgaatgagattcgttccaaatgtcgtcgtttaaaacaagaaacaggtcttggtatgatcgtaatcgactacttgcaacttattgcggggagcggtcgtggcggtgaaaataggcaacaagaggtttctgagatttctcggtcgttaaaagctttggcgcgggaacttgaagtaccggtaattgccctttcacagttgtctcgtagtgtagagcaacgtcaagataaacgtccaatgatgtcagatattcgtgaatcgggttcgattgagcaagatgcggatattgtagcctttttataccgggaagattactatgatcgggaaggtgaaaatgacggtacgattgagattattattgcaaaacaacgtaatggtccggtcggtgacgtgaaattagcctttgtaaaagaatacaataagtttgtgaatttagaagtgcgttatgatgacgcaatggcttaataaggaaaccttgtgaaattctaattagatttggagtttgcaaggtttttattttatgcaaaaaggtatcgtattactaaaaatgtactttggttttctattaaaatgattaaaaaagcgaacgataaaattaccttacaaatcaatgttcgtaaatccattgactattttggtggcaaacggtacaatgtatagtggaaaatgaagaggctatgaaaaaatcatagctatcaaagaccaattaaatgaggtgtttaaatgtcttcagttgttgttgtaggaacacagtggggcgatgaaggaaaagggaagattacggattttctttccgagaatgcagaagcgattgctagatatcaaggtgggaacaatgcgggtcatacaattaagtttgatggcgtaacgtacaaattgcacttaattccatcaggtatcttttacaaagaaaaaattagtgttattggtaacggtatggttgttgatccaaaagctttagtggaggaattaaaatatcttcatgacaaaggcgtggatacttctaatttgcgtatttctaaccgcgcgcacattattttaccgtatcacattcggattgatgaagctgacgaagaacgtaaaggcgcaaacaaaatcggtacaacgaaaaaaggtatcgggccggcatacatggataaagcagctcgtgttggtattcgtattatcgatttactagataaagaaacttttaaagaaaaattagagcataatcttggtgagaaaaaccgtttactagagcgtttttatgagctagagggctttaaattagaagatattttagatgagtactacgaatatggtcaacaatttaaagactatgtttgtgatacgtcagttgttttaaatgatgcattagatgatggcaaacgtgtgttatttgaaggagcgcaaggggttatgcttgatattgatcaaggaacatatccatttgtaacttcaagtaatccgattgctggtggcgtaacaattggtagcggtgttggcccatcgaaaatcaatcatgttgttggtgttgcaaaagcatatacaactcgtgttggagatggtcctttcccaactgaattatttgattctattggtgacactatccgtgaagttggccatgaatatggtacaactactggtcgtccgcgtcgtgtaggttggtttgatagcgtggttgttcgtcatgctcgtcgtgtgagcggactaacagatttatccttaacgctactggacgttttgacagggattgaaacacttaaaatctgtgtagcgtacaagttagacggaaaaacaattacagaattcccggcaagcttgaaagacttagctcgttgtgaacctgtttatgaagaactgcctggttggacagaagatattactgaagtgcaatcattagatgacctaccagtaaattgtcgtcattacatggaacgcattgctcaacttacaggtgtgcaagtttctatgttctctgtaggtcctgaccgcgcgcaaactcacgttgttaaaagcgtgtggcgtttagcttaatattactacaacctaaactctctgaggattttccttggagagtttttttgatgttattaataggaaatattgctcatggcaaggactttttctttaaaatcactgtgtatcatttgtgtatttaaaagttgtaaaatttaacaaaaataagttttgtttgtgaaaaacacatctttttatagaaatgggattccacaaaaatacctaataacgttgaaatgaagtggttttgttcgtttttatgtcacaatttcttttgtgaattcatgatataatttgattgtgatagcttattcacaatagataataagaggagatgaagtgaatgtcaggtcaaattcgtatgagtccaagcgaactacgtgatcgcgcgaaaacttacggtcaaagtggtcgagatattgaggatattctaagtcgtttaagtcaactacaagatcaactacgtagcgaatgggaaggtcaagcttttatgcgttttgatgatcaatttgagcaattaaaaccaaaagtaactgaattcgcaaacttaatggatcaaattaacgatcaacttgagaagacagcaaacgcagtagaagagcacgatcaacaactttctcaaaacttcggattctaaaaatcattaaacagtaaagcatacatacaaatatcgttggatgctttacgaaaagccatgcagttttttgcatggctttttctaaaatagaaagcttatgtctaaaaaggcatttatataaaaaaagacacagcgggagtggacatgaatgaaaaaagtaaaatggagtattttactctttttagtcttggcgatttttttatcggcaggaattacttatttagccttgaatcaaggggctagtaagggtgataaaaataatacggaaaaagcgcataaaatgactatcgcgcttgttaatgaggaccaaggagacacattccaaggaaaacgggcagagtttggaaatcaatttgttaaaagtgttgaaaaagacgaagaacatgaatggtacgttgtaagtcgcggtgttgcggagagcggcttaaaacgagatgtatacaatatgatgattgttattccgagtgatttttctaaaaaagcattatctatgacatcagaggcgccagaaaaagtaaccattagttacaaagtaaatgacgttggaaatagcgacctaaaagcagaagcagaaaaaacagctgcgtctgtattggaagatttcaacacgcgtattattgatgtttattttgcgagcattttaaccacgttacaagaagcgcaagacaatattggcacattagtaaaagaagagaaaaaatatgacgcaatttacaacaaagatataaataatccactatcaaattatacaaaacaatttaaaacagtagaagattataccggagcctctaaagagagttttcagggttttcaagagattatgaaggcttttgaagaaagcttaaatctcgctaaaaaagaaaatgcggaacatatgaagaatatggatgcttttacaaaaacgcaagaggaaaatggtccacttcgagccggattcgcggaaaatttacagacatttgatggaactttgactgcggaagatattagaacgcaaacagtcgctttagaaagagccaatgatcagatgacttcagaattccagattatagaaggaaacaattcgttactcacccagactcaagcgttacaaagctacattgcagaaacgaatgctcgtattgaagcgttagatgctgagatcatcggaacgctcgaaaatgatttccgtacagcagtatataacgacttgttacgtattctacaagaaaacgagtactctgatagattgaatgaaattggtcttaaagatttggctggcgaggatattaatgctggttttaacaatatgattgtgaaaactatcaaggctttaccgacatacaatacggaccaattagcttcaatcggacttgacgaggagttatataaaaatattgtaaccatttcaaaaaaatattatagcagtcatcgcagtgcttttggtgataatttcagcatcacaaatgaaatgaaaactctaccaacagatacgctaaaaagtgacgctataaacaagctgaaatcagaaggcgtggcgctagaaagtagttcaattaccctagaaggaagtgaatatgcttctgaaattctcctaacattagatgaaaacttttcatttgaaaatgttgttggggttgtaaatggagatgctcaaacgggattagttcaagtagctccttatggtgaaaacggcttaagacttaccattccagctctagggacgccagttgaaattaaggttacggggacagcgaaactaaaagagggagcaagtgtgcctttagttggggcagttaattggactgcttccttgcaacaatatgaaaaacaagaatatcctcaaatgcctacgattccaattggtttagatccctctactccagaaagttcgctcgtagttagaaaagaagttgtacctattaaagtcacagagcctacgtatcttaacgaaacaaaaacttctgtaaaagctattactaatacagtgaaagattattataagttgcaggcgttgtttgatttgtattacggaattgacgcaagtgactcagcacagctaccggattttagtaattatagtattaccttagaaaactctgcgaaaacgtcttcgtattactacatttttaataaggaagatgttattagtaattttgtaaatcttacaacagaccgatttgtagcggattataagaaaaaaattaatgcattcaaacaacggattgatgattataaatatacaatggccgaagcgaattcgcgctcagaagatgtcactaacaggctcactgagacaaccgaacaagcaataaatttaaataccaatttagcactaactttagaaaatctagaatcttggcgaaatgcaagtaaggatttaataaaagaaaatgatgtagttttagataaaacgggtgaggaagctacaatggcgcttcaactgaattctgaatttgccggacttttagcggaaagtgaatcacttgctgggacgtctgaaggcaacttaaagtcggcggaagttgtctatgaaacttttgatgcgattgataaggaagcgaagaatattcagcaaagcggtgaaaccctagttaaagaagcttctactttatcggaggacttaggagaaaaactgaaagatgatgaaactttccagaaaaatttcgctaaagttatggaaaatagccgtattggcgatcggcaaaatgaaaatctctacagtttcttaagtaatccagtagataaaatgaatgcgggaactattgtcgctggagataaatcaatgccgtacttcatggttctaatttgtacaattttggcgattttcacaagttatgttatttctcaccaagagaagaaacgccagcaactaaatgaatttgaaaaagaaatgtccattgtctttaaaaatattccaatcacgtttttgatgatatgtgttggaataattgaaggcttagtaatcggcgctatttctggctttatttttgatttaggcgaaattgggattttcctatggattggggtttgtttactgattatgatggcgcttgttactgcattttcgtacgtactacgccaattaaacatgattggaatgtcgattgttttactcgttttgagtttgtacctatttttaacagatgcggttggacttaatatcgataatgaatcaatttttgcgacctttaggaaattttcaccactacaatatatggaacagttgctgaatggaattttaagtatgcaacaagattacattattattgtatacagtttgattggcgcgacattagtgtttacagggcttaacctgttcgtttggcaccgttctaacaaagaagatgcagaggaggattcagatgaaatttaatattgcagtatttattgtattgatttgtttcgctttttctcctagtgtcctcgctgcggattcggatagttatcttgaaaatagtgggaaaatggacattaaaacagatcgtcttcaaaagacaaatgaagaaaagaccaaagaactggaagacatggaagaaacagagcttgataaacaaggtattccactttttacagatgaaatggatgaaaagatagcgaaacaaaaagcgacagaaaaagctgaatatgaccggattaaagagtcgttgtttgaagaagagccaactgctggtgaaacggttaaaaagacaaaagaaaaattatttgctgaagaatatgaaacgaaggctgcaacaaatgaaacgacggttacggaaacaatcacagaagatgaaactaaaaagacaaagcaaaaaacagttggtggagcaattgctggaacacttttggctttagctggcggaatttatgtggcggcgcgtaatgtatttgaatagaaagcggggaaaacgaaatggctaaaaatacacatatgaatgtgacggttgatttcactaattggggtgcggataagtatgatttacgcatcccagtccatcaaccaattaaagcattaattattaatttggcagaaacactcaaaatagaatataaagatttatccaaatgtacaataaaaacgacgaataaagctattttactaagcgatgatgataaattaactaattttcaaattgctgatggcgacattttagaaattttatagaaaaaaaggagaatgaaaacgatgaataagacaacagaaatggacggaacagcttacgattttacttatgaggatttagcgtggagtgtaacgtttcctaaatcaaaaacacatgcaaaagaactagcgcaactagaattattagaaaaaccagctgctcattttgttccggcaaaaattacgagcgatagcgattcctatacgatttcttatgagattgctcaacatacatatggctttgagcaagttcgcaaaatggaacgcgaagataagctacgagcgttgcggaatattgcggatttaagtgaattactgaatacacgctatacttttttcttacatcccgataatttgatttttgatataaatttagtcccgagcattgttcaccgcgggattaagaatattttaccaccatatgaattgaccgaagaaatattctttaagcaatatcagtgttttgcgattgcgctgttttccaagaagttttcttttgaaaatttatataatggctcgctttcgggtgctagaggaactcagtttgaaaaaagtattttagatgcaaaaacgattcaagatattgctgatattttagaagaagcttatgtgaaagaaaataaaactgtgaaaaagaatatggcaattgttccaaagaaaaaatacggaacttttcgcggacttgcggttggttttattattgtagcgattttacttgccattccagtgagctattttgcattcatcaaagtaccacttcaaaacgatttactcacagcgaacgaaaattttcttaaaacagactacgacaaagtaattacggggcttgagaatgtggatcctgaaaaaatgccgcaatcagtgcagtacgaacttgcttattcctacgttaacggcgaaaaaatgagtgataaaaagaaagaaaatattatgaataccatcagtttgaaatcggatcagaaaaatttactttattggatttataatggtcgcggtgaatttggtaagtcactagatattgcgaaacttttagatgatccaacacttgcaatgtacagcttaacgaaacaaatcgaacaagtccaaagtgatacaaaacttagcggcgatgaaaaagtagaaagactaaaaacgctagaagaaaatttaaaagaatatgatgaaaaagtaaatgcacaaacgaaagaaacagatgcatcaacaaatacagaagcaaaataagggagactgaaccatgaatagagaggctttattaattgttagtaacgggcaacaatgtcataaacaccatttgtcccctgaaaaagtcgtgacaattggtaatacaatcgaacacgaaattacttatccagaactagttgaatcaatggaagttaaatatgatgaaaactcgtggaatgtcggtacaacagcgcttcaagtgaaccaatccgtgaaagtggacaatctagcattttatctttgccaagatctggatacgcaagtgtatgatgtcgtcatgaacatttctgtagcctttggtgcgggaacagagaacgatgttacgattgatggcacaaaatcagactttttacttttgcgcgatgcgaaggaaaaactgtttaaattacaagttttaaatggcgaaatttatcataatttttctttagtaacagaagactgcgttctagaaccgggtgatcagctctatacggacggtgtgacgattacaattggaaaagaagatattagtgtgctagctgtgaaaaatcgcgtgacgagcaaattagcgcctttattcgctgcggacaattcgttcggagaagactatccagattatcaccgttccccgcggattatttaccgtgctccagaagaaaaaatcagcatggcgaaaccttctagcaagccctccaaaccaacagatggcttaattaagattattttacccccgttaatcatggttgcgattactgtgatgatttctattttccaacctcgcgggctgtatattattatgaccatcgcgatgtcagcagtaacgataacgatggcgattattaattacgtaaaatcacgcaaaaaatacaaaattgattcaaaacaaagaatcgagagctacgatttgtatttaaaacgaaaaacgaaagaattacatgaaacaagtgagaagcaacgccacgccttaacttaccattatccggatgtaactgaactggaaaaaatggcgcttcgagtggattcacgtatttatgaaaaaacaatgttccaccatgatttcttgactttccgagttggacgcggcgccgaagcaagtagtttttctgtcgaatttcaacaagaagaatttagtcaggacaaagatgaacttattgatgaagctgtgaaaatcaaaggacaatatttatctattaatgaagtgccagttgcgacagatttaatgcacggaccagtgggttacattggaccgcgccgtttagtattagagcaacttcaaatgttggtaatgcaaacagcccttttccatagttattatgatttacaatttattaccattttcccagaagaagagaaggcggattgggactggatgcgctggttaccgcatgcgaatatgcgtgatgtgaatgtgcgtggttttgtttaccatgaacgttcgcgcgaccaagtgctgaactcgctttatcaaattttaaaagaacgtaaacaagcgcttactgaacaagcgagtaagcaggaaaaattatatttcacgccacattatgtagttttgattaccgatgaaaaattagtactcgaccacacagtgatggaattctttaatgaagatccaagcgaactaggtgtttctttagtattcgtgcaggatgtgatggagagcttgccagaacacgtgaagacggtcgtggatattcgtgatgcgaagagcgggaacattattttggaacaaggcgatctggtaaaccgagcattcgtgcctgaccatttgccagcagattttgacaaagaagtaatcagccgtgctcttgcgccgctaaaccatctacaaaacttgaaaaactctattccagaatccgtcactttccttgaaatgtacggtgtggagcgtgtcgaggagctaaacattgctggacgctgggcgaaaaatgaaacgtataagagtcttgctgtaccacttggcttgcgcgggaaagacgatattgttcaactgaatttacatgaaaaagcacacggtccgcatggtttggtagccggaacaactggttctggtaaatcagaaatcattcagtcttatatcatttcacttggcgtcaatttccacccatatgaagtcgcgttcttgctgattgactataagggcggcggtatggcgaacttatttaaaaatatgccacatttacttggaacaattacaaacttggacggcgcgcaatcgatgcgtgcactagcttccatcaaagccgaattgcaaaaaaggcaacgattatttggcgagcacgatgttaaccacatcaaccaataccaaaaactatacaaacaaggaaaagcgaccgaaccaatgccgcatttattccttatttcagatgagtttgccgagctgaaatcagaacaaccagaattcatgaaagaactcgtttcgacagcacgtatcgggcgttcactcggaatccatttaatcctagcaacccaaaaaccaagcggtgtcgtggatgaccaaatctggtccaactccaaattcaaactggccctaaaagtacaaaacgccagcgattcaaatgaaatcttgaaaacaccagacgcagcagaaatcacactaccaggccgttcatacttgcaagttggtaataacgaaatttacgaattgttccagagtgcttggagtggcgcggattatgtgccagataaggaaagcacggattatattgatacgacgatttatgcaattaatgacttgggtcagtatgatattttgacagaggatttgagcggattagataagaaggatgatttgacgaaactgccgagtgaacttgatgcggtgattgatcatattcatgcgtatacggaggcttctgggattgaggcgttgctgagaccttggctgccgccgctagaggaacaaattttcttaccagaattgcaccaagtaaatactgaagagctatggagcggtgagaaacaacctcttcaagctaccattggctttttagacataccacaaatgcaagcgcaagagccattaacaattaatttggcaaaagatgggcatttagctgtgttttctagcccaggttacggtaaatcgactttcttacaaacaataacaatggacttagcaagacagcataaccctgaaagattgcatgtttatttactagatttaggaacaaatgggctactacctttgaaaaaattaccgcatgttgctgacacgattatggtagatgaagaaattaaaattggaaaacttattcgtcgcttaacactagaattaaaagaatgtaagcaaaaattgagtaaatatggtgttgcgaatatttcaatgtatgaaaaagcaagtaaggaagaagttccagcaattttactcgttatagatgcatttgattctgttggagaagccccttataaagatgtatttgaaaaactaattgctcaaattgctcgtgaaggagcgagtgtagggattcatttagttatgagtgcagttagacaaaatgctattcgagtacaaatgttagcaagtataaaacatcaaataccgttatttatgattgaaccaggtgaagcaagaagtattgtaggaaaaaccgatttagccattgaagaacttccgggccgtggattagttaaattagaagagccaactgttttccaaacggcactgccagtttgcgcggatggaacacttgaaattattgaaaaaatccaagcggaaagtgaagcgatgtctagcgagtggaacggatcacgacctgcgccaattccaatggtacctgaagttatcaatatgcttgaatatctagaaaataaacaagtccaaaaatcattttcagaaggaaaaacgccaatagcagtagattttgaagatgtattaccagtcaatttagatgtgcaaacagatggcaacacacttgttttaacagataatgcagatgttttggaaagaaccatggtttcgctaactgaactaattggtcagaatatggaagtggatattgctctatatgacaattcgtctaacagattccaacagtacagaaacaacgtaaatatatacgcaggtgaggaaactgccatgaatagtgcttcagagcaaattgttagcgtactcgaagctcgagaagatggttggaaggagattcaacgggcatcgaatggagaaatcacactcaaaatgtatgttgaagaattacgaccaatgtatgtactactaacggatagtatctatgctgcggaacagatgtctctggaagctaggaaaaatatggtccgactaattgaaaatggacctaaattaggtatctactttgttaccggaagccaaacaggaattctatatagagctcgagatgaaatttctggtgaattacgaaaacaaaaaaccggtatcttacttggacggatttcagatcaaaatattctcagtctcataaacaacatctataaagaagctctgctagcgccgtatgaagcgtattacattaaacaaggtcaatatgaaaaaattaaacttattgcaccaaatcaataattgaaaggagctgttaatgatgggtctaacagatttctggaaaacacctactgagaaaaaacgagatgaatacgataagctgcatgactatctaaaagatgctctcaaaaaacatgatgaaaaaatggcagaagtaaaaagtgatttgagtgcgtataaaaaaggaatgcctgatatgccgagcaaaggtattcctgcaaatccgtttgtagaaaaaaatgagaaagtcttagagcagcttgaaaaatatatagataaagaaaaagataaacgtgccagtttgaaaagtgctattgatacagcttatagaaaatatttagagtataaagcattggccataaaagaagaaaaagcagagcaagcaaagaaagagaaggagaaaaaagaacgagaggagaggctaaagaatgggtaatgtgaaaattgatgccgcaaaagttgctgaagctaaaaaatcggctgccatagtggaaaaaagcttagaatcaacacataaaaaatgcaaatcagttatttcttatgtagaaggcgcatcttggagtggtaaatcgcgggacgctttccttaccttcatggaattaattgaaaagtatcatgctgatgtgaagaaaaactataaaaagcaaaagaaagcattaacttccttagaagattatgtagaggattttgagaatacttcatacttcaaggatgtgaaaagactatgacagtggaaacgatagacgtattttcccctgttgagttataccttttactttctccaatcgatgcgcaacacttatttggtgttcctgacaagcttacttttttattaaagggagaagatgtttttgctgaagggtttgaccggctcaagagtaaagggatattaaataatgcaggcgagctaacggatggcggcggctttttgattgattccttaattgaatattatcaaagtaaaaagtatgtgcgtatgaaccagttgatgtttgcttttccagaaaaaacacccaatgaactacttgtaatgattgagataactcctcaaagagaatatcgatttgaacgaatgaataaaatttatgcgctagaaatgataaaagatttctttccgctcattcgtagagaacctggtgaaagagagactgagtttctaaaagaagaattgactaatgaagagcgtaaacgagcaactgcttttgatccggagaaaaattttattagtatggaattctttcatgtggatgaggaaccaaaagaaaaaaacaatgctaaatattacaaacagtacttggcatttgagatggaagacaaattaatgatgatagatgttgtaaacgatacctattaccatggaagtcagtatgctttattaaaattattgtttgatgaacttgaatttccttatgaggaggctaaatagatggcacaacaaacgatgggcggtgcaggagccgcttctacaatagatattaatccagatgaaatgactcatattgccaaagagctactagctattgccaatgaatttgagggtgtgataaaaccagcaataaatcagttaaaagcaaataagtatttaaccaaaggcaaagcaaaaaaagcaatggataaagtacctaaagcgaatgaacgtgtaatggaacttcaagaccaatacaatatggcgtcctctgttgtgtttgatatactccaaaccatggttgatgcagacagagatattgccgaaaaaattatcgcagctttagaggtataaggaggccagatgaatgaaagaagtcaactaccgagaagacgactggcgtgaagccaaaagtgccctcgccccatttgccgcagcgaattgggtaggcggtttattcaataatttagaaaaagtatcgaaaaatatggaagaagcagaagaagatatccaagagttggactcagatcgcgcgatttcgtttcaacatactaactatcgcgggaagtacagcgccatcgaagacgatttgatggtgttatataagtttagttgtcatgcaggggaaaagatggaaaccctggtagaccaaccgttttatgagaagttggacgcgtttgtggatggcatgcaagatttgagtatttcgacgtattctaccaccaaccggattggtgcgaagtcgaaacaaacgtacatgtcttcttacggcaatcagccacaagtaattgaatccgtgaaagacaatgcgacgatcgaagacttactaaacggagacaacttctacgcaaaccaaatgcaactacaatatagggactggcaacgagcgaatccaaatcaagatgtgagtaagaaagactttcaaatggggatgttacatagccgggtatttgaatataaatcgattaaagatgaacaacaagagaaagagttttgggtcaacattgtggcaaccgtggtgattgtgggtgtcagtattttctgcccacctgccggccttgccttagccgtaggatacgggagtttagaagctggttcggcgataagtgggaaggactgggtatctggccgagaactaagtacggaagaacgggcgctccgtggcggtttagcgctgctagatatcgttccaggtgtgaaagcattgagcacaggagcgaaagctgccagtgccggctcgaaacttgtccgcgtaggcgataatattttagtaggtagcaagaacgtcggcaaaggaaccatcgacaatggcattcaagcagggaaacaagcgatggatctccggttggccaatgcgaaaaaagtcagcgaagccgtccaaaagaaactcaccaaagacctcgacgatattagcacgatggccaagaccatccaaaacaaaaccaaagaaaccttcacgcttccaccgcgtgagcaaatcgcctttgcgggaggaggcagtatcccggaacaaagtgccgctggagccgcctccatagctgcgaagaaaaagctgaaagatattatgcaaaacatggataatttgaatgtgaagggcggcggtaaagctggtataattgagggtgcagaaaatagtggaaaatatctagatgatattgaaattcctgataatatgaaaaagtgggattatcctccaagtaaagagttgtttaaaaaatatgaagaagtatataagaatccgaagtattataatcaggaaactggagcgattaattggcctccaaataacggttttataggagaaacgcatgaaagacttgcgaatgtgggagaattttttgatagatatggagagcctagtggggaatttttagcaaagtcaggcttttcgtttgaggaacgcgctctagctccacatagtgaaacctctatttactataaatatagagtagaaaaaccattcaaaattatagaaggagaaacagctccttggtttgatcaaaaaggaggagcaacacaactttatgggataactgaggatggtactgtattatctgtagagcaattaatagatgaagaatatttagaattagttaattaggaggtattttaaatatgataaaaaaactagtagattttttaggtgaagatagatacatcgttgattctgataaagatagaaaaaaaatagaagtaagagaacgagcaaatggtattgtaaatcaagatattatctttgttttagcctgcaatgaattaaaatacgagctattcaaattgtctagaggtactaaaacaaaaattatgacattacatgataaagaagtagccatcttttattttggaataatgattaaaatgagccgatttaaaacgatttgtcctagaccggaacttaagaacactatttccaacgagatagaggcaaagaactgtctgtcaagatttctggattctaacttgttcgaaatagaaaattataagaaagatgccatttgccttattaacgaaaaaaatacttatgtagtgggttattgtgatatagatatgatttttcatacaataagtaatgataactctagtttgacaatgggagctaaagttctagctaatttcacctggaaatatatgtattttaaacaaatgattaaagaatatgccatagagttagatcagaatcaagtggattataaggctattttacgtaatttgttgaatcttaaaaattagaccttaagtaaaggtgagtctaatgagcagtatacagataaagctatatctgttgctgacggaaatcctagaattttggaagaattattaggacttgaacctatgagtttaggagaaaatcctgtgttactagatataaaaaaaccaccaatatgagagtgcctagtggtaatgaatcaggtgcttggcaaagtttttgggaaccaggaggatccacaagtggtggaatacctgaagctgttgtagatacaattaagaggatgaatatattgctaaaaatgtattaaaatgatggaaggataaattttaatggaaaaaatttatagaggaaatggattcgcagtaatagaaagaaatggagagtttcaaataactttccctaaaggagtaacttgtgaaccagtattctttcccattacaaaagcgctgatgggaaaagcgttcaagtcatgagacggtgcctatgaagtaatgaaatatgctgaaacaggtttatggccagagaaaaatacagaagaagagtaattttataaaataaaaagatactttatcttcggtttggtattggaacgtaaagtcgtgaatagtaagagcaagctcgctaatcaagttaccaataaataacaaggagacaaaattgatggattataatttaaaagaatataaaaaaattttagaagaagatatttatttacggggttatcaagaattaagatacgctatattcgaaggtgagaaaaataatcgacaagaatatcaagttagaattgagaagaatgaagctaaatttgaagtttatatgacagctgatagagctagtgtaatggggaaacatgagtttaataatgtttttgatgctatggataaatttttaaatattatgcaaagtaggattttatcgaatcgtcgaagagtgaaagacggggaaccaccagaatactcctgtccgttatgggataattaagagtggaaaaaagaatatcttaagagaatgtagagaactgtattgatagaaatgacctaagcacaggtgaatgtccttaggttatattctcttttccgcttgtgtttttttgaatataaaccttgtgatatggggagtttcttctaaatccataaaggagtaaagatgatgaacatttccagcatatacaataaaattgaaacagagttttctattataaatgatgcaaatagcctaatttctattgctgttcgaggaataaatcactatccagagaattttgttaaagtaatattgaacaagcggagtggttactttgacttaatgaatatggtaagaggaaaagaatatacggtggcttcgttttcagaagaggatagggcgataatagcagtatacatttatggaaagaataaactggagtttaaagactataattcgaatattaaagatgagattgataaggcgcagtcacttgaagaaattaaaacaatttttatgcttgtttttggagagcgatactactctttttttgataggagaaaaggtagaatcgtgttagaaaaagaaaataatgacaggtacaatgttttgtattacgggaaagataaatccgtaatatatattactaaatcaagaaaattaaacatcgcggctaaagttttatgtaactatagtttagatttaaaacatttttatgaaataattgaaaaacttgagctagaggaagattttaagtttgtagaagaattaaaaaagctgtatttatttggtcgcagtgactgtaattcaatagattaggtatatagaaaatcgattcaaaaagttaaatgggatgttaaccatattgattaatgtgagatccagaagaactcagacaaaaaccgctattccaacctaggaaatcggataccagatgaatgaaagaagtcaactaccgataagccaaaagtgccctcgccccatttgccgcagcgaactggctgggcggcttatttaataatttagaaaaagtatcgaaaaatatggaagaaggtatccaagaactggactctgaccgcgcgatttcctttcaacacaccaactatcgtgggaagtacagcgccatcgaagacgatttgatggtattgtataagtttagttgtcatgcaggggaaaagatggaaaccctggtaaaccaaccgttttatgagaagttggatgcgtttgtggacagcatgcaagatttgagtatttcgacgtattctaccaccaaccggattggtgcgaagtcgaaacaaacctatacaactacatctggcggttcgcaagtcatcgagtccatcaaagaaggtgcgacgatcgaagatttgatgaacgacgataacttctacgcaaaccaaatgcaactacaatatagggactggcaacgagcgaatccaaatcaagaagtgagcgaaaaagactttcaaatggggatgttacatagtcgggcatttgaatataaatcgattaaagatgaacaacaagagaaagagttttgggtcagcattgtggcgaccgtggtgattgtgggtgtcagtattttctgcccacccgccggccttgccttagcggtaggatacgggagtttagaagctggttcggcaatcagcgggaaggactgggtatctggccgagaactaagtgcggaagaacgagcgctccgtggcggtttagcactgctagatatcgttccaggtgtgaaagcattgagcacaggagcgaaagctgccagtgccggctcgaaacttgtccgcgtaggcgataatgttttagcaggtagcaagaacgtcggcaaaggaaccatcgacaatgggattcaagcagggaaacaagcgatggatctccggttggccaatgcgaaaaaagtcagcgaagccgtccaaaagaaactcaccaaagacctcgacgatatcggcacgatgggcaaaactatccaaaacaaaaccaaagaaaccttcacacttccatcgagagagcaactcgcctttgcgggaggaggcagtatcccggaacaaagcgccaccggagccgccgcgatagccgcgaagaaaaagctgaaagatattatgcaaaacatggataatttgaatgtgaagggcggcggagagggtggtacaatagaaaaaatcggtaaaactaatgaactgaaaagcccatcgtcaattgcaaggagttggcaagggggcggtaaatatccaggagtggatgactatgaggacattgtattgaaagtgggggatgtcatttacagaggagagccaaatggatcagaatactttaccactaaggaagtcatagaaaatgctgatattagtgcgactaaaatttttgaaggattacaagtcgaaaaacatcctatttatggctatcggaaaagtatgacagggtataaagtgaatagtgaagttgatgcagcatctggatttacgaaagctaatccacaatttggtgagggtggagcacttcaagtttttgttccaaatgtaaatgaattaatagaaaaaggcattttaatacctattgatgagataaaattaattgattgaggagctaaataaatgttaaatactgtaaatggagaattgaagataaatgatgaattgattgttcatcctgaatatcaatttgatgaatttaagaacacaaagtattatgatggacaagacgggattaaaataatttatctggagaaaatacaaaaaattgatacgtatcattactttgtaaatttattttttaaagaaaagcaattatatagtgtttctcttattaattgtgatcaaaacatttctgaatctaatgaaatagataggaaaacaatacacgataaaatattaagtgagaacggtattcaaaataatgtaagttataattggggaaaaataatttctgaatatgatccaagaagtaatataagtagtatagatattttttataatataaggtaatgcatgcaaggagttcgttatatgctactacctatttatcaacagtttgacaattttgtataaatagtagggaaaagtcaactactctgtgttctttaggaactacttgagcagctttagaaaggggattgctaactatgagtacaaaatttgctaaatacaaagaagttatttataaagttagtaaaattggtgataatacagtaagacttgttagtagtaatgaacaagatatacaaaagggatttgtaaagaaagaatacccagataactatttaaataaagaaaaattgccagacttatatatatgtgaagttgacttttcttgtataaaagagctgtatgaaatatcagatatagtcgtgtataaagaaaaggaatttgaatctattactgaaaccaaagatttttttagaattggtactataaatacagaaatagctaaagaattaaattttgaaagaactgataaatattattatgaaaaatgggtaccgaaaaatgaagtaaagattgagaaggaacgaaaaaatatacctttaaattaacttaatgagcacttatattaaatggatgattgcttctattgattaatggaaacttagaataaggcttggacgataaccatgaagaaaatgcgaggactcatgcgaatatgagaaatagaattttatttcaaagacttagctagcgttcaacaaggagaagtagtacaagtatttggagctggtggaggaactcaaattcaactaggaacagtagttgattggtatgaaaaattgaatcttttaaaggagataaaataatgagttatgatttaatggaatataaaaaaattttagaagaagatatttatttactgggttatcaagaattaagatacgctatattcgaaggtgagaaaaataatcgacaagaatatcaagttagaattgaaaagaatgaagctaaatttgaagtttacatgacagctgatagagctagtgtaatggggaaatatgaatttgaggatattttccaagcatttaaccaatttttaaatattatgcaacttacagtcttgtcaaatcgtcgaagagtaaaagacggggaaccgccagaatacccctgtccattatgggagaagtgaaaatttagagtacaaaagagtaaacaggattgtaattgctaaactcacaagtgatattgaaaatagatttattaaattgttgtcatccaaataaacttttacggaaaactgggattggtaagaatggttgtagatagtgctgctttttattaataatcatagagaaaaagaaactaaagtagcattaaaaaccaacaaaaaagcaagtgacaaatttctataacaaatttcaaatagagaataaaaaccaactacatacgggaacaagtagtctaagatgggggagagaatcttaggctacttagcatatgcaagagtttacatttctacatgcatctaccaaaaaacatccatgttaattttcctcgcacccccaacccccacacctgctatactaactccatcctaacaaatggagttgaaaccaatgacaaaaaactttaaaaaactaaaatccctacacgaactccccgccccactaaccctctacaactgctgggacgtcgcttccgccagagcaattcaacaaggaggagcatcagtaatagcgacaagcagttatgcaattgcagagtcactcggcgtagtggacggggagcatttaacttttgacgagatgttttcagttatttcgcgcattgccgagaatgtgagtttgccgctgacggtggatatagagactggatatgcaagaaatttggaggaactggctcagaatgtggagcggttgctggcgattgatgtttgtggcgtgaacgtggaagatcagcttattggtgctgcaaatccggggttatgcagtactgagacgcaatgtgataaaatcaagacaattaaagaaacggcggcgaaaatgagcagggaaattttcatcaatgcgcgtacagatgtctttttccaagggcgagatgagacggtagacttggtgggagaagcgattaacagggcaaaggcatacaaggaggctggggcggatgctatttttatcccgggtctgttatcaccaaaattaattcgcgcatttgttgagaaatcaccacttccagtcaatattatgatgatggatgggatgctctcagtcgaggaattacaaaaaatcggtgtgaaaagaatcagttatggaccgtttagtttttttcaggctaatttagcgattcagcgggaagttgagcggattttcgaaggaggaagagccttatgataacaaatcagcgggatattgataaatattatgatatgttagtggagaaaaattcgaattatgaaggcgtattttttgtcggagtgaaaacgacgggaatactttgtcgtccaacgtgtccggcgaagaaacctttaaaagaaaattgtgagtttttcagtacagccaaggaggcgttacttgcatcttaccggccttgcaagcgttgtgaaccgctctccaatccgacgaaattgtctccagctgtgaagttacttgtcgatgcaattgagaaaaatccggagaaaaaatggactgataaagattttgatgaattatccattagcgcaaatacggcgcggcgccagtttaagaagcagtttgggatgacttttattgagtacgcgcgttcgcggcggcttggacttgcttttaagcatattcggagcggggattcgattattaatgcgcaacttgatagtggttatgagtctggtaatgggttccgagatgctttttcaaaaacgatgggagatgttcctcataaatcaaaagatataacgattctgtactctgcttggattgaaactaagctaggatcaatgttggcaatttccgatgatgataaattacttctgctagaatttgttgatcggaaaggattagaaactgaaataaaaaagctgcgaatgcgattgaaagcagcaatttcccctgaaaaaacagcggtaattaagcaaatggaagaagaattagggagatatttcgatggcgagctagttgattttgagacaccaattcgttatattggctctgaatttcaacaaagtgtctggaatgaactgcgacgaattccggtaggtgaaacgatttcgtacaaaaggttggcagaaaaactagggcgaccaacagcgagtcgagctgtggcaagagcaaatggggctaaccaattatccatcatcgtcccgtgccatcgtgtaatcaatactaacggagcattaggaggttacggcggcggtcttgcccgaaaagaatggctaattaaacatgaaaagatggttccaaagtaacgcggaaccatcttttttcaattatttaacccgtattccaaacaacggcatcaaggcaggagcatgagaaaaatcaatgctcacacccttcaaatcttgcggcatcgcagtaatcgactcaaaaatgcaagaactaagatcaatcccatttagcgcacaattcaaaaactgtgctttattcaagtcaagtcgttccaaataggtgtcgaccagttgagccccgctaaaatcgctattcgtatacgcacccgcttcaaatgccacccatttcaagttagcatagcgaaaggcaacataatccgcataacaatcaacaaaaacgcaatttctaagcgtagcatcactgaaattcacaccaattaatttacaattttcaaaacgtacccggtgaataattgcgcccattaaatctaaattcgacaaatcgcaatttttaaatacaacatcagttaaattcgcacttacaagagaaaccgaatcaaaaacacaaccatcaaaaataattgtttctaaatgaaaatgctcgaaaatttccccagttagcgtcgtttttctaaagatttgctcactaacttctccaatatcttcaataaaatatgtatcattcggataaaccgtcaaatccccatcaggaatccgcggcgcagtaatttttttcatgatttcaaacctcgcttccgcttccattatatcgtattttgccaggaaaaggtgcgtaaaatcgtttacctttcataaaaaacggattacaatgaaataagggtaaaaatggcacttgaggagtgaaagagatgacagcaagcgtatttgtagcaggaaaattactaccagaaacgatggaagctctagataaatgggatgtaaaaacgtacaaaggcaaagaaaatattacggagtctgagctaataaaaaacgttacggatgtggaagcaatcatttgcccactttcttcaccaattacagcaaaagtactggaatctgctaaaaatcttaaaatcgtagcgaatattggcgctggttttgacaatattgatgtaaaaaaagcgcaagagctgggcatcgcggtaactaacacaccggatgtatccacggaagcgacagcggaattaactctcggattgattttagatgtggcgcgaagaatttcagcaggtgaccgtttatgtcgtgaaacacctgagcaatttaaagggtgggcgccgacattctttttaggtacggaattaagcggtaagactctaggaattataggtttagggagaatcggtcaggctgttgcaaaacgcgcggctgcttttggaatgaaaatcatttattctgggcaccacccgaaagaagcagcgaaacagtgggatgcggagtttgtaagtcaggatgaactattaaagcgcagcgatgttgtgacgattcacgcagcatatagtccgagcttgaaacatttactcaatgaaactacactaaatacaatgaagtcgagtgcttttttaatcaatgcggctcgcggtcctgttgtagaagaatctgcattaattaatgcgctcgaaaaaggtgttattgctggtgctgcgcttgatgtatttgaatttgaacctaaaattggagctgaactaggcaaactagaaaatgtcgttttaacaccacatatcggtaatgcgaccgtagaaacacgcacagaaatgggtcgaatggccatttcgaacgttgaagcagttttagcaggaaaacaaccattacattccgtttactaagttaagaaatacagtcatggcaaggtgctgtggctgtgtttttacaccaaattatgatataatgttttttgtcggaatacgacgagggttgttagctcagttggtagagcagctgactcttaatcagcgggtcgggggttcgaaaccctcacaacccatatataaaaaccgcctaaacaaagcgtttaagcggttttttgtttgtgaaattttagtttaaaattgcctttttttattaagtggggcagaggtggggcagaaagcttaaaaagggttctcaaaatcgctagctgcatctttgtgcgtatctttcaaaacatgtgcataaatgtttgaagtggtcacactagatttatgtctaagccgctcttggataatttttatatctctacctttgttcaataaaagtgtagcagatgtgtgacgcaaatcatgaaaacgaatcaccggcaagttgtgtctttctaaaaatcgtttccaacgctgataaatcgaatcaggcctaatcggtttgccttccatgtcggcgaataaaaatttgtgattggcccatttcccttcagtttttaggtctaaaacttcattgcttatatatgtttctattaaattagttaaccaagcgggtatagaaactatcccagctacatcattcttagttgattctttaagaagtaaaccttctcctgcttttgcaactagcgtttgttcgaatgttagctcatcttctattaagttcacgtgttttacttctaatgctgctaattcagcttctctacaacctgaaatcagcgctatataaatcattacttgcaatctaagtggctctttcactagagctgcatttaacaattcaatttcagcaggagtataaatagtaggcggtcttttagttgtttttggaagccttacaccctctgcggggttaattgggattactttccactcaaccgcagtttcaaatactgaatttatcgcaaaataaatatttctgatagatcgcggcgaaagcggcttatttttcttttcgtctgaatctgtaggtttaacatctaatcttgcgccgggcttttgtaattttgcgactaagttaactatatgaagtgtagttattttatccatttgaacgccgccaaaggctgggtaagctcttgctactatagatttgtagtattctgtccaggttttaacttctaggttattttgtgcatgtttcggcatatactcattctcaacaaatgctttaaatgtcattcttgcaggagctgtatatccattttgctctaattctgtgatgaaatttcttaactctctttctcgctccctctcattttttgttcgcgtcgttctgtcagctcgaatcggcgtacctttgtagtcatagcctacagtcacgcgcatacgccatgaatttttgctacgttgttcaatagaaccctcataacgcctaccttttactttttttaccataaataagccctcctttcgcacatatgttcttttttcgataaaaagaaaagcctattggctctctttattttacatatttgacaaatctttcgagtttaactatatcttttgatgtaatgtttaattctgttactaaatcaatatcttttgttttattgtaaaagtaaaaaattgcttttgatttattttcaatttgcgtagaagtgctgtttgttttaccgctacttcctgccaatgcacctactactgttcctgcgcctccgccgactattcccccaactactcctccagcaatagttttcccagctttgctattagttttagtgtgagtgttgtacgtcgcacctagccacttataatcaacaaagtaaaactcatcatttgtcacaagaccatctttggataaaaaaattatctgatttgatggaattagttgaaccatgttataagttgttccaaccgctttctttatagcgaaatttaaatcctgttgtgctaaattaaaatttaacttaatttgaggcgagttactcggaatttcttttacatcgaatttttcatgggtggctttttttctctttattcttaaagcaagccagatgaaaagagctgcaaatgcaaattcaattaatgccatgccaggtaattgtgatacagctaaaataataataccggtaaaaataaacaaaccagctagtacaaataaagctatcatcccgttatctcccttttgtatgtaccaatctgcggccgcgaactggttacatagttatattttattcaaaagccttgcgacatcttctaacttttcgctttgacttaatctactatcaataactatgaaaacttccttttttaaagtgaatgaacaagaagtaaattcgtgttctagcatcactacatcatgttgcatgttcagttcatctagttttttcatgtatttataccccgttgttttttattgcaacgttgcacctatattatacataattttcgtggaatatatcacgttttcacacaatgttaataattaacttcaataacaagtaattaagttacaagtcaagaggtttaatagtaaataaattacacattacttctttttttgttgctcgtaatattcaataaatgttttgaccgctttaacagcctcctcatcgtccatgacacgtgcagcaactgctttaaaatctggattttcctctacgaactttgccacgtcagcatcttttttcgctgcaatatctgtgatgtctatttcctcttcattagcatgttcttttcttttttcttctatataagcgagtatctctttcatatcttcttctgatgcgtttgaatcaatgtgagctgcgattgtgtcagcgagattattatcgtctcttcctaataaataatcagtagatacattaaaaaattcagctattttcagtaatgtttgatagtcaggctctcttgttccttgttcataattagctacttgacctctagaaaatccaagttcgtcggctaatttgtattgtgaaaaaccttttttctttcgcaactcagataatcttttactaaacatttctaacacctacgctttctatatgtatattataagaaacaattagtttccagtccattaaattttcaatgtagaaacaaaaagtttctaaaaacgcttgacagaaacgttatgtttctgatatagtttgtttatcgagaaacgaagtgtttctttttaggaggtgaacaatttgagagaaaagcttgttaaattgagaggcaagcgctctagacaagatgtatcaaaagatttgggcgtgactcctcaaatgcttggtgcaattgaaaggggagatagaaccccctctctaaatttagctaacaaaattgctaattactacaatgttccgattgaagatattttttttaataataaagacacgtattgtgtctaataagtgcaggaggttagaaaatgaaagtaggagacattttagaaattgcgggacgagtagttggaagaattgaggaaataacagaaggcacactgcttgttaggaagggttatgtaacttatcaaggtggacaaaaagttattgtgcttaccaaacaagcagtgtacttagatagcgaaacaattaaaaatgcatattggattaaaacaatagattcatcgattatttcggaaaccgttaatctcattgcctgcgacaacttgattcgcgaattcctggacatgtaaatttaccagttcgtgaccatctacatgtgctactacattaactaggtaatgcggtgcttttatattggtacttgaaatgacgtcaccttttctaggtaaataatagagttccatattttgaagaactttcccttcttcgattagcgaaactttaatcataatatcacctccaatcaaactaattatagcagattggagagtaaccaaaaataggaggctagaaaatgaaaaaaattgcatttacaaactctttcctaactaagagaaatagaaaagagtcagtactcaccattgaattaagtataactggcgaagattttagcgatttaagtattttgccggaactttattcagaaattaattcattagttaatagattatcggaaaaaactaacggcgatttgggcaaaagaaaataggaggctagaacatgagtaacgaagagttaactttgtcaatcaaaactagtcaaagagaagatgggtctgcatataatgccattcaacttggtgactggaaagtaggacgatttgtaacaggtgttcatttagaaatactaggcggtaaacgaccaaagttaattattgaatgctatccagaaagaatagatgtggatggtttagaagtagaggcttttttaaaacaaatagaggaggaagaaaaatgaataacatcaaacaagcaattattaaattagaaacaattttagaaaatggtaatgaaaaagagaatagattattcgttaagtacaacactataaaaaacattttagatttacttgaaaaagatcaagagctaaaaattatcgaaatgaaagtagagctgaatggagtagaggattccatagaaaacgccactttgttagaaaagagattaagtgaagccaaatctttggtggaagacttggctagcactataaactcgttagaaattaaggtgaagtgaagcttttccaaaaagaataggaggttaaaaaatgaaggactttgaaatgatggaagcaattaaacaaaaacggcttgaatgtaaattagtaattttggaaaattttgaatcgagttttaaagaagccctcaataagggagattccgccatggtgtcggctttagcggaatcattgaaaacagttattaaatagtgaactcaatgtaaaggacatcatttgagttcattagaaaaactttcgataaatcgttttctaactcgcttgcacccttataaatgattttgtaagttttatcggcttctaaataaaaatcatttaaatcaaaacttttgttatctggaaaagatgtaatgcttataacgcccattagagcaatgggctggtcatcagagatacctttgaacattatatccatgcgatttttcacaaattccacctcccttcacaaaaactatagcactgtgaaagggcgaacagaaaggagaacaaaatgtcaaatttacaaatcttcaactttgaaggaaatgaagtaagaacagtatttattgaaaacgagcctcattttatcggcaaagacgtggcaaaagtattgggatattcaaatagccgcgatgcattaaaacgccatgttttccttaaaaacaagggggtcgtgaaacacgactcccttggaggaagccaaaatttaaccgctataaatgaagcgggtctatatcagttgatttttaaatcaaaactagaatctgctgaaagatttcaagactgggttacttcggaagtattgccatctgtccgtaagcatggtgcttacatgacaaatgacacaatagaaaaagcaatcactgaccctgattttctaatcaaactagcaacaaatttaaaagaagaaaaaacgaagcggatagaagcggaacaaaggttagaaatacaaaagccgaaagtgatgtttgctgaagctgtaagcgatgcaagaggaaccattttaataagagatttagctaagctaatccaacaaaacggcatcgatattggggagaaaagactatttgaatggatgcgccaaagaggatatctcatttcgagaaaaggcacggattacaatcgccctacgcaaaaaagtatggaactgggactgtttaagattaaagaaacagcgattataagatcaagcggagcgcaaacagcaattacagcaaaagttacaggcaaaggacaactttactttgtaaataagttcttagaacaatcattaaaaacaatttaagcgccgctaccacaacggcgctcgcagacaacttagtcacggggagcgactaacaatagtatataacgataagttgttaattagtggttaaaaaataaacaaaaaggattgagatattatgtttcaaaaatcaacatcagcgccaaccgcgatgcaagttttagcagaaactcgcacgcaaaaagagctagcgattgatagttatgtaacaccagcactaataagcaaccagttgaaaggaaagcgtacagtttcacttgaacaagcagaacagttaattgatagctacaacgaaccagaaagcacatatttattcgcacatgaattttcaaacggaatgatacctccacttttcgacggcttagacagtcaccatgcggctttaacttgtcgctttgaactagaagtaacagaagcagtaaatgcgttaaaaagcggattagaaacgatgacattcaatttaagaaaaggcgacatgctacaacgagaagccgcaaaacaagcaatttcagaaataacagatgtaatcgcaacagcattaacgcttaacacaagtatagcgaaggcattcaacattaatttacaacaaattttagaaagtcgagataaattctatcaaaaaaatggtttggtgaaggagtgagaaacaatggaaacaatggaaaaggatattttgacagctgaggaagcggcggaaatgttaggaatgaaaaagaggactattcaatcttgggctagaaatgcgggattacccggcaaaaaaataaacggcaagacatggatttttagcaaaagagaacttgaagcgtgggtagcgcaaggtggagaaaaataaaggagggctacaacaatgacagaaagagttttcagaaagactacaaacttcggtgatagcgaaattcatacaaatagcagaacaaaaatgattgctaatccggcatttcagcagaaaatcccgttaaacgaaacaggttgcgacaacatgacggactatatcgaagagttgaagttaaaaggctatgaggaggtcacgcgctgatggatgtatttatggtaatgattttcgtgtcgtttatgtctgtaatcgcaggtttttggctgagaggaagtgataaacgtggttgagaatccgatggttgttgatgatctttgggacgatggttttagacattaaaaaagcacgcatagcagtgcgcgctttaaggatttgagatattaccttaagaaaattatacctcaaattcacatattaatcaatggaggtagcatatatggctattgcaaaagaaaagacaatgaacattttagcaagcgtgaaagacatggatagaacacaatggttgctgactcggcgcttaggtatcggcggaagcgatgcgggaatcatcatgggtttaaatcaatacaaaacagctttcgagttgtggttagacaagaccgaccaggttccgcccggtgaaatggcaggagaagcagcatactggggaactcaaatggaagaagttgtcgcaaaagaattcgaaaagcgaactggcaagaaagtaagacgtagcaacatgatgtatcaacatccagagcatgattttatgttggcaaacgttgataggtttgtggttggtgaagacgctattttggaatgtaaaacagcatcagcatacttagcaaaggaatgggaagctgacgaagtaccagcgacttatctagtgcaaatacaacactatttagcggtcacaggtaaaagcaaagcctatgtagctgttctaattggaggaaataaatttatttggaaagaaattgaacgcgatgacgagttaatcaatcaaataattgcttttgagttagatttttgggaaacgaacgtaaaaggacatgtagcgccggcgctagacggttcaagtgccgcagaaaaatatttaaaagatcgttttgctaagtcagaagctaaacaagttattttatcaaaaaaatacaacgaatttttggctgaaagagcaaatttagaacgcgatataaagcttttagagacacgaaagaaagaaattgataataatatcaagaatgatttaaaagaagctgaaacagccatcgcagacgaatttacgattacttggaagcctgttattacttcaagagtagacactaaacgtttaaaagaagaacatccagacatttacaaaaaattacgtaaagaaactagttatagaaaatttgcagtgaaggagaataaataatggcaactaacgatgaattaaaaaatcaattagcaaataaacaaaatggagggcaagtagcaagcgcacaatcattagacttaaaaggtttgctagaagcaccgacaatgcgcaagaaattcgaaaaggtactagataaaaaagcgcctcaatttttaacttcccttttaaatctttataatggcgacgactatttacaaaaaactgacccgatgacagttgttacttccgccatggttgctgcaacactagatttacctatcgacaaaaatttaggttatgcgtggattgttccttacaaaggcagagcacagtttcagcttggttataaaggatacatccagttagcactacgcacaggacaatataaaagcattaatgttatcgaagtgcgcgaaggtgagctactgaaatggaaccgacttactgaagaaatcgaactagatttagacaacaatacaagtgaaaaagttgttggctactgtggctatttccagttaattaatggctttgaaaaaacggtctattggactcgtaaagaaatagaagcgcataaacagaaatttagtaaatcggattttggatggaaaaaagactacgatgcaatggctaaaaaaactgttcttagaaacatgttaagcaagtgggggattttatccattgatatgcaaacagcggttacagaggacgaagcagagcctagagaacgaaaagacgttacagacgatgaatcaataccggacataatagatgcgcctgtaacgccgtctgacacgttagaagctggctcggtagttcaagggtcaatgatctaatttgaaaggagaaaagaagcatgtcacatgggtgggttaaattgcatagagatttgaaagaaaagcctatatggagaagctctacacccgagcaaaaaaccatccttgtgactttgttaatgatggcaaatcacaaggaaaacgagtgggagtggatggggaaacctttcaaagcaaaaccaggtgaattcgtcacaagtattaagtcaattacagaggaatgcggcaaagggatctcttcgcaaaatgtcaggacagctctaaaaagatttgaaaattacggatttctaacaaaggaatcaacaaaggtaaacacccttataaacatagtgaactggggcgtttatcaagaatcggaaaataaatctaacacacttgctaacaaacagctaacaaacgactcacaaacagctaacaaacagctaacaactaacaagaatgtaagaactaaagaatgtaataaaaacaacaacaacagcgatttaaatttcaaggatttttgggaacaaaatggattcggaatgatgctaccgattgagcaagaaaaactacttgcatgggtagatgatttttctggtaatcgagaaatagtttttaaggcattggaagttacttctgaacaaggagcgaataaacgtaattatgcatacgttaataaaattcttagaaactgggaagaaagaggatttaaaacggttgctgatgtgaatgcggcagaagaggaaaggcgaatgcaaaatgaacagaagtataacaagcccgcttacggcaaatacaacaagaatcagaaacaagaagtcttgccggattggtttgatagcgaggtaaaaccgcaagtatcgacatcagaatcagaatcaagcgaagacttagaaaagaaagtcgctgaaattaaagcgaaattagcggctagaagcgaggtgcaggcgtgacagaatacgcactttataaagcagacgaactactaataatcggcacagtagacaaactagcggagtttcagaaagtgaagcgtgagacgattttgttttatgctacgcctacgtatcaaaagaggacgactgataaggggttaagagtaattagagtggtttagaaaggatgaaatttcttgggaaaatattactggcacgtgtcaagatttggtggaaagccgacagaaattcgacactataaccacattacaaaaatgtataaatttattttgcgaaatccggcaatgttcaaagataaaactttaacgatttatgatgacgcaaaagcagttacaaacatgacgtttaacgaaattaagtatagagctagtttgaatttatgtgaaacggtagaaagaaagtatgtgttgtcacttactcaaaggcttaaggaggaacagaaggaggctaaaaagtgaaacgaatacttaattatcccggcagtaaatggggtttggcagatttaataattgaaaatatgccggagcataaaagttatttagaaccattctgcggatcatgtgcggtctttatgaacaagcaaaaagctactttagagacgataaacgatttagacggtcgactagttaatctttttaaaacaatgcgtgataatccagaagaactgcagtatttaatcatgcacacgctgtattctcgtgaagagtatatgctttcgcatgaaatatcaagtgattcattagaagacgctagacgcatggctgtgaggctctggtttgccgtcggaggcaagactaatgcaaatgttggatttagaaaaaacgtgtcttggaatggtccttacaatgcatatgagtggaatgacatgtataaccgaatcggaatagctgcagcaagactgaaagacgctcaaatcgaaaatgtagatgcaattaaactgattgaacagcataacgataaagatacactgatatattgtgacccgccatatgttgcaacttctttagcaagttcacattatcagcatgactttagtttagagcaacacaaagagttactaaaagtgcttaaaaagcatgagggcaaagtaatgttaagcggctatgaatcagaactatataaacaagagttatcagactggccagctcttaaaacaatgacaaaagtaggcattacatcagaaaagaaatcagataggcaagaaattatttggtgcaattttgagccaccgatgcaattaaatctttttaaggaggaacaagcatgagatttaaagaaggcgaaaacgtacacgtaattgtaggcaatgaattgttaagtggttggtacaacggtaaagagtttggaacaggcaactctttagtgaaagtttctaaggacaagataatagctactaaagattgttttattgccaaagaaaaggaagcagagttggtagtagttccgcaattagtaggtgattttttggaaaatcattctaaagaagatggtcatacacttcatgatttattgtgcgatttattaacttctagagattcgctagatgaaaatgtctacgactggatcatggaaaacaatagtgaaaatggtgaattgcttgcacgcgcatggcttgacggctacgaagtcgagaaagaaccgctttattatgtgaagttaccgatttcaaagcggaatgaagctacagacgaattagaagtaattaacatgtgtcttttgttaaatatacaatcacacgaaacatgtatttctggaaattacagatgggttgataagctaaaaagaacgggttggagaaccaaattgacagaagctcaaataaaagatatgcccgaaggtgacgcttattggcagtttgctgttcctgttagagatttggagggtgaagcatgagagcgattggatttagaggtaaacgaatagacaacagagaatggatttacggtaatttaatgcaatttgaggatagcgctactttcatttttgcagatgaacgaaaaggcgctagcacattaacttatgcacattttattattaataacatgcacgcgatagacgaaaaaacacttggaagctgtataggtcgtgaagatgaagacgaaaaaactatttttgaaaatgacattgtgcaagtagttttagaacactggccaatgggatactaccaagaagtagaatacattggagtggttaaatatgacacggatatatgtgcgtattatcttgatttgattaagcctcctgctgttagtggcgaaacgataccggatgaaatcgacggaattaaaattacaagagaagactcggaagatttcgatacaagattctacttcgatgctagcgttgattcagcagctatgacagtgataggcaacatacacgaaaattcggaaatattggaggaacagtaaatgacgttaagagaagcattagagaagcacacaagatatatcttgttttgtggcatgtgcgagtgtggacttgtatggactatctgaatttaaattcaaaaataagccgaaggaagggacgatagcatgagagagattgaatatagagcgtttgtaaaagaaactaagaaaatgcttccagtcacagatttgtgttttaacgaaacagagtctgtaggcgtaagtggttgcggcaacccatattgtacaatgtgcgtcgactggtacaactttgacgatgtcctgctgatgcaatacacagaaagagaagacatcaacaacaataaaatatttgaaaaggacattgcaacttgtcagtttttcgacaaaaaaatcactggtgttatcgagtttatcgaatttatgtgggcagtaattgatcacaagaatcaacgactatatcagttgaacgaagttagcaatattgaagttgttggaaatgtggaagaaaacccggaattgttggaggtgtcggaatgaacgataaaaaaacagattataaagtatataaaataacatacaagcaacgtttcatgggggaagttattgttgattcatatgaaagaacggtaaaagatgataacgaattacggtctgcaattaacgctttatatgacgacccacatgtgttttcagttagtagtgaagaggtggcggaatgattttatatggagtagtaacatataacgaagtaacagagtggacaacggacttcctaacagctaaaaaatggttggaaaatgctaagcaagttttctatgacggagaacttgatgaagattactatgttgcgttaataaagttagacgtagaagcattcttatacgataaatatgacaaagaaacagatttgagtgatcagttacatgatgaagctgagacaatgaaagagtattgtttgttattagatgatgacggaacttacatggtgaaagaggtggcgaaatgaacgacaaaaaagtaagattctacgtttctacgggcatgcacggatcacttgaaacagaaacatttcttttgaaagcggacttgaatattgagttcgagatattaacacctgaacaattagaaaaagagattacagaggcttacgacgactggctaggcaataatattgactcgggctggtctatcgagaaaggaagcgtctaaatgactaacacaataaaaatatctgaaatagataaagtgttccagattgcgacggaagctgggtgggttgaacagactggaatgcaagcgacgattgacggaatagactttgcaatatgtccattaaaaaatgaaaaaaatgcatttatacaagttagcgaagttaaaagcggcgctgcattactgagggttccagtaaatcttatagacatttttattttggatactcgagataaagcaatcgaatattataaatataatgtaattcctttaatcaagaaaaaagtcgaatttaacggattagataaatttagaaaagaagttgaaaaagcgaaaaaatatatggttgaaactcacggagaacgaccggaaattaaagattttgagggggaatgtaaatgatgaactattacagcatcgaaaaaggcacaaaagcatatgagtatttagacaaaatttacaatcaagatacagacgcttttttgaatgaagttactgaattgctaggatttgaagcaagaggacatatagctattaacagagcgcctttaattattgataaaaaagcgcttaaagagtttaagccagagtggctgccgaaattcaaaaaatataaaggtgagttgatgactccgaaaacggcattcaaggagctaatcaatgcatatgaagaacttcagcaaaaatacaacatggatatgacattcagaaactttaatataaataacgctttagcaggtaaaacagaagttatctatgactttgataacacaggtttcgtttattttgaatctgatcgaaaaatattaaaagaggattttaaagaaataacggatattgattatattaaaagaaatttagaatgcgcaatttggatgaaagagagggaagacgaatgatgaatcgtgtagtacttgtaggacgactaacgaaagatcctgatttacgatatacgccagctggtgcagcagttgcgacttttacattagctgtaaatcgtacgttcactaaccaacagggagaacgagaagccgattttattcaatgtgttgtttggcgtaaaccagcggaaaacgcagctaatttcttgaagaaaggaagcatggcgggcgttgatggacgcatacaaactcgaaattatgaggatagcgacggtaaacgcgttttcgttacagaagtagtagctgaatcagttcaattcttagagcctagaaaccacgcagaaggcgctacatcgaataattatcaaaacgaggctaattattcaaataacaataaaacaagctcatatagagcggatacgagccagaagagcgattcatttgcaaacgagggtaaaccgatagatattaatccggatgatttaccattttgagcgaaagggtgaataaaaatgacagcagaaacagcaataaaaaagttgagaaatagatcaatgagcatcagacaaatggctaatgcgattgcagaagtcacaaactaccaaattagcgaaatcgaacaaatgggggacgaagaaattgaggcgaagtatacggcgtacgtcattaacgaaacaaacgagtacgcgaagtaaatacaatgcgaagaaagttgtcattgacaatataaagttcgatagcaaagcagaagcagcatattatcagcaattgaaattattaaaaatgagcggggaagtagtgagcttcgatttacagccagagtttgtactacaagaaagctttcggaaaaatgggaaactgtatcgagcgattaaatataaagctgattttcttgttagatatagtgacgggcacgaagaattaatagacatcaaaggaatgttgacaaaagagtttcgaatcaagcaaaaacttttcgaactgcgttatatgcaatcaattaagtgtttgaagctgaaagggcgaaattttgtggaggtgtgacaaatgacagtaatggagatgacgaagagtaaagcgaggcagcgggagataattagttatatagcaaataacgatgtagagcttgacgaattactaaagttgcaaaaagaactcaatcaactaatgaacgagaatacaatagaaaagcaaaaaacttactggaccaaaacgttcgatcgaatcgtgaaaaagaaaaaatggccggaaattacaattcatgaattcgctgatttacgtaatgcaggactaacgtgttacgcaattgcagagcatttcaaagtgtcgaagtcgatagtctttaattacacacaaagaaacaaaaaagaatactataagctgtttgatatggatgaatatcaacggaataaggagatatggaatgattgataaagtagcgaaatttattggagctttgactatatacgctctgtgggtcctagtactgattttcgtactaggattagtggttaaagggattttatgggcatggagtaatatgttttaaataattacaagggggcgactttatgggacaattattcaatctaccacaaattgaagatataaactacattcagacagtcggagcagtaagaaagttctttaaagactatttaacgctgcgagtgatggctggtgatcgtaaatttccaactatgacgactatgtacaagattacgccaccaaattttggcaatgagtttcattcgaaagtagaagatgctgcaattcataatgtcgataacgttcatgcagcacaagaagcggttaaaaaatacgatgctattttgaatcaacttgagcacatccatagaaagatactgttcgagaagttcattcataacctacaagatataactattatgcttgatattccttatgaagaaaggcaatacaaaagagagaaaaggaaggctgttattgaattagcaacaacacttgggattgaagtgctaaattgaaaatggcacttttctggcactttttgagcaaaaaaaggtgataaaatgttattagtgagaagtgaagatgattacaaaaataaaatcttatattgagtctgcgctccacttctcattaagtattaaaagtgatttgttaaatcttgagcaatatttttatgtttgttaaaataaaagcgaacaaaaataaaaatattggagggattttaatgaatgaaaaagaaaaaattgattttgcaaggaagtatattgatgaaaaaggctaccatgaaatctataaagtaacagatggaggaattttggttaggttagataaagttgataaatttctttcattaccaggcaacgaagaaggtattataaataacatagaaaataataagtagtattaaagccctgtttttcagggcttttttgatacataaaaataaggagtggtaaaaaatgaataatcaagaatttatagacaaatgtaaaggcgttgttttaaattacgctaacagtcatttagacaaaagcgataaaaaagaaattggcttagatgatgtttttgtagtatggagttgtaaaacattacaaaacagcaaagcgctactaagcacaacgttgtacgatggcatgtattatgaatgtactttcaatggcgacaaatcagaattgtattttgacgcatacaaaaaatgggaaaataaaaaaattagtatttgagtctaggtgttcctaggctctttattttatcaaaataaagggagttggtgatatgtagtgaaactaaccgaaaaacaaaaacgatttgcagatgaatatataaaatgcggtaatgctacagaagccgctcgtcttgctggttatagctcgaaaacggctaatcgtatagcgaccgaaaacctgtcaaaaccagttattaaaggctatatagacaaggttttaagcgaactcgaagaaaagcgagtgatgggctacacagaggcaatgcaattattcaccgaaatagctcgaggtgaaatggaagaagaagtaattgtttcgaatggtgatggtttttccgtcgttactaagagtgctgacatcaatcaacgagtatcagcgctaaaagagattgttaaacgccacgttgctggcggtagagacaaattacaagaagagcttattcaagcgcaaattgataagttaagagcagatacaaaacaagaaggtaatcaaggaacaactactatcatcatgtcaaatgttgacgaaatgcaagcctaccttgataaaaaggcaggtggcgacgatgaacgcgatgatacacaaacaactagttgactatcaggttatcaatgtaatagacaaaatcaatcccgctttttacgacttgtggctatctaaacataatcacatcatagcaaaaggcgggcgttcttctatgaagtcgtctgttatcagcttaaagctcgtagaaaagaaaatggctaatccgcaatctaatatggtgtgtcttcgtaaagtagctaatacactttataaatcagtctatcagcagattaaatgggctttgtatgaaatgggtgttgctgaccaatttaaatttggtaagtcgccaatggaaatcatccacaaagaatgggggacaggcttctacttctctggttgtgatgatcccgctaaactaaaatcgatgaaaattccagtcggttatgttagcgatttgtggtttgaggaattagcggaattctctggcgtgactgatattgatgttgtagaagatacattcattcgtgaagatttgccgcaaggacaagaagttacaatatacatgtcatttaacccgcctcgtaatccatatgaatgggtgaatgaatatgtagatagtaaacgtagtgacgatgattatttaatacatcacactacttatttggatgatgaaaaaggctttttatctaagcaaatcattaagaagattgagaaatacaaaaagaatgacctcgattattaccgctggatgtatctaggtgaggtaattggtcttggtgataatgtttataatatgaacctgtttcagccgcttaaagctattcctgcggatgacaggcttattttaattgacttcgctattgatactggacatcaagtatcagctaccacgtgtctagcgttaggttttacagcaaaacgaaatgttatcttactagatacgtactattacagtcccgctaatcaagtggttaaaaaagcgcctagtgattattcaaaggagctgagagagttcatgacaaaagtagtctcgaagtataatgcgccagtgggcatgcaaacagtagatagcgcagagggagggcttcgcaatcaatattataaagattatggcgttagcttacatcccgttgctaaaggaaaaaaagtggatatggtcgactttgtgtgtgatttattggcgcaaggtcgtttttattatcttgatattccagaaaatcaaatattcatcgaggaacaccggaaatatcaatgggatgtcaaaacagttaatacagataagcctgaggtcatcaaagaagacgatcatacgtgtgatgctttccaatactatgtaaaagataatttacgcaaattaggtcttaaattctagggggtgaaaaccttgattaaccaaataatcgcgggagtgaaaggagtgatgcggagaatgggactattgaaatcattgaaagacgtaacggaccataaaaaagtaaatgctaatgatgaagattataagtatatcgatatgtggaaacgtctatatcaaggccattacgccgaatggcataatctcaattatgagcataatggcaatccggttaacagacgtcaattatctatgaatttgccgaaggttacggctaaatacatgtctaagcttctttttaatgagaaagtgaaaatcaatattgatgataaagccgctgaggaattcgtgcttaatgtattgaaaacaaacggttttacgaagaacatggaacgctatattgaatacggcgaagcgatgggcggttttgtgataaaggtttatcatgatggcaataaaaacgtcaaaatttcatttgcgacagctgattgcatgtatcctttgtcaaatgatagcgagaatgtagatgaatgcgttattgctaatagtttccacaaaaacaataaatactataagttgcttgagtggaatgaatggaaggggaaggaagagaaagtatacacaatcacgacggagttataccagtcggacaatccagatgaacttggtggagaagtaagtttgaaattgctgtttaatgacatcgagccagttgttccactcccgccgcttacacgtccgactttcatttatatcaaacctaacatcgcgaataacaaaaacttaacttcacctttaggcatttccatttatgctaacgcattagacacattaaaaacgcttgatttgatgtttgattcatactatcaagagtttaagcttggcaaaaagaaagtattggtgccttcgagcttcgttaaaacggctgtcaacttagacggctcaaccacgcagtatttcgattcaactgatgaagcattctttttatatcaaggcgaccaagatgcagatggtaaatcagtaaaagatatatctgtagagattcgttcaacggagttcatcgagtctataaacgcaatgctacgcatttatgcgatgcaggttggattaagcgctggcacattcactttcgatgaaaacggcttaaaaacagctacagaagttgtaagcgagaagtcagaaacttatcaaactaaaaacagtcattcgcaactaatcgagcaaggcataaaagaaatgattgtgagcattcttgaggtcgggaaatttatcgaagcttatagcggcgatgtagttgagttagacacgattacagtcgattttgacgattctatagcacaagatgaagatacaacaatcaatcgttatactactgctaaaaaccaaggtatgataccgcttaaaattgctttacagcgcgcttggaatattaccgatgcagaagctgaagagtggaaagaagagatagaaaaagatgcacgagcagaaattccggggaatgatttatctggattgttaggagatattgagctaccagatgaaaacgcgaacgggacattagaagctagtgctgttgcaggcgaaactattcaagaggtgtcactaaacggcgctcaaataacttcattagtcaatatagttcaatcagttgctaaaggagagcttccttataattcagcccttgaaatgattgttgctgcatttccatttgacgaagaaaaagcgaaaaagattttagcggatgctggcaacggctttactatcaaagagaaggaaaagacctctaaaaaggaagtggattagatgacactaactccacgacaactcgacttatttgtgcaaccggttgttgatgtatacacaacgctcgaaaatgaactgttcactcttattgttcgacgattgaaaacaaagaaaaatatcagcgccgacaatgtgctggcttggcaaatagaaaaacttaatcaagttcatgcattagatcagcaaatgataaataaaatttctaaagcttcgggagtatcagctaagaagcttttttctattgtcaaagatgcgggatacagtgatttaaaacaagtagataactatttcagtaaattagccaaagcaggtgctgtgttaccacttgtgaccgacgggcaaacaatagtcgataaagtaatgagaagttattttaagttagcacaaagcaactacaatcgcgtcaatcaaacaatgttatcgcaagcaagacaaatttattcagacatcatacacgaaacgacacaaagcgtcctagctggtttaaaaacacatagacaagcattagctgaaacggtaactaaattcgctgaaaatggcgttcctgcgcttgtagataaagctaataaaaggtggacacccgaggcatacgtccggactgtaaccagaacaacagttaacagtgtttataacagcattgaagacgagcgaatgaatgaatttggcgtggatttagtgcgtatttcacaacacataggagcacgaccaacgtgttcacttgttcaaggcaaagtaatctgtttgttatctgttgaagaaacaaaaacgaaatacggaaataaatacatgtctatttactcaccagaacttagatatggctatggagatgggattttcggttgtaattgccgtcatcatcgttttgcttttattgaaggcattaacattgcgccagacgaaagcgagttaatagatgaagaagagaacaaacgcgtttatatgctaagtcagcaacaacggttaatggaacgtgatataagagcagctaaacgcaaattatcagctgccgaagaattaggcgatgaactagcagttaaaaaggctaaacaagctgtcagaacgaagcaaagcaagctaagagcatttgtaaaaacgcacaatttgactaggcagtatagcagagaaaaagtatatacctaacattcgacctgttcggaagtcgtaaaaagacggctctcgcggtcgttgccgcgtaaaaatatcggaggaggaacaaagatgcaaagagaatatttaaagggtttaggcttggaggatgaagtcattaataaagtgatggctgaaaacggtaaggacattacagctgctaaacaacaattatctgaggtggaagcagagagagacggcttaaaaagccagctaacacaacgggacaaagatattgacgatttgaaaaaagattctggtactagtgaagaattgaaaaaacaaatcgaggacttgcagcaaaaaaacaaagatttagagtccgattatcaatctgaaattgccgaaaccaaaaagaattcagctattgaactggctcttgctagtgcaaaagcgaaaaacccaaaggcagtaagagcgcttttggataacgacaaactagaattaacagatgaaggcctgaaaggtcttgacgaacagctagaagcattgcaagaaagcgatgcttatttgtttgctcaagaaagcggaaattcagctctaaaatggggagcaagtggaaatcaaacaggtgggacaggggagcaaggcgcacttaaacttcctaatcaagtgctaaatgaacacagaatcacaaaataattattaaacggaggtaataaattatgggttttaatccagatactacgacaatgcaaaatgcaaaaacaggttctattccgattaacatttcggaaaaaattgttacaggggtaaaaaatggttcggcggcgatgaaattagctaaagctgttccaatgaacaaaccggaggaagagtttactttcatgagtggtgttggtgctttttgggtagatgaagcagaacgtattcaaacaagcaaaccgacgtttactaaagcaaaaatgcgatctaaaaaaatggctgttattattccaacgaccagggaaaatctaaactatagcgtaactaacttctttagtcttatgcaagaagaaattgcagaagcgttttataagaaattcgaccaagctgttttcactggtgtagagagtccttacaactggaacattcttaaatcggctacagatgcaggtcatttagtagaggaaactgttaataagtatgacgatttaaacgaggctattggtttaattgaagctgaggacttagaaccgaacggaattgcaacgattcgtaagcaacgcgttaaatatcgcagtactaaagatggtaatggtatgccaatttttaacactgcaacttcgtctggtgtagatgatgttttaggccttccagtagcatatacccctaaatatacatttggtggtaaagatatttcggaattagttggtgactggaatcaagcgtactacggcatcttgcgcggcattgagtatgatgttttaacggaagcgactctgacaactgttaaagatgaaaaaggtgaaccaattaacctagctgaacgtgatatggctgcattgaaagctacttttgaacttggattcatggttgttaaagatgaagccttttctgttgttcaaccaaaagcgggaaactaatggcggcgcggtcgggtaaaactgatagcgcgccgattaaagacttttcagctatgacagtagcagaattgaaagaagagcttgtgaatagaaatatcgaatttgcaagtaatgcgaaaaaagcggagttggtagctctgttggaaggtagtgattgatatgccttacacgacactagaattttatactaacgagtatgcgggggagcatttggaacaggatgaatttgacaaactgttaaagcatgctgaaagaaaaattgattcagtgacattttaccgaatacgcaaaagcgggattgaatcgtttagcgaatttattcagcatcaaatacagttagctacttgtaatcaaattgagtattttaaagaggcaggcggaacaagtgagctagctgtttccaagccggataatgtgagcatcggaagaacgtctattagtgatagcaattttgcatcaactgctacatcacttaatagcggattagtgggtagtgatgtaaggtcctatttagcgcatacaggtcttctttacaacggggtaggtgttcgttgatgaaagtagtaaaaccgataacaaatgcccctccgttgcctcttgactggctaattcataacattagctatgaagcgtataaagaagaaggtagacacaatcaagtcgtttatgaaaaaggctttgagattgaacatgttcgtgtcgatttctcaaaatcaaatcaaatcgcgggattatctgatagtgatagatatgacgcggttatttttattgatgcagtgaacagcatgaacgtgccagatgattttataagtagatcgagaatttttttctctggaaaagcttataagattgttaaggttataccttgttatgcgacctctgaaaatgtgcaccattgggaaatagaggtgatttgatgccgattaaagtacgtgtagacctctcgaaagcaaaagggagcgtaaaaaaggcgaaagaaagaggtcagtttgctttaattaaccaggcggctgctgatattgcgctttatgtgccttttttaagcggtgacttgtcgaatcaatacgttattatgaacgacaaagaaatcatgtggacatctatttatgcgcggagactctacaacggaataaacttcaatttcacactcacacatcatccgttagctggtcctaaatgggaccagcgtgcaaaagtagataagctagaaagttggatagaagtagcgcaaaaagcggttgaggagggactataatgtcattagattttttagatagtgttatggatgctatcgaaaacaacgtcgatttaaaagatatgaaattaagaacagcgatattaaaacccgagtcaattgctttgctactgactccaaataacgacaaacaaggttatcaagacggctcttatgagcggtctttttcttttaatctaaacggctctagcaagcaagaaatgaaagttttaaatgtgttgaatgctattactgcttattttgataacacagaattagaaagcattcagagcttaaataacagctttgtgctagaagacaaagaaacaactagtgtggcgaacctcgtttctgctagtgacgatggaacgtttatttatagcgctagtttcaaaattaaattatatattgaaagcgaggaaaaataaaaatggctagaattaaaaatgcgaaaacgaaatactttgtagctgaaatcgtagatggtgtgggcgagccagtatggaaacggctgtcaaaatggattacaaacgtgtcagacgatgggtcagataacaccgaagagcaaggcgattatgacggtgatggcaacgaaaaaacggttgtgctaggttactcagaagcttacacgtttgaagggacacacgatcgtgaagacgaagcgcaaaacttaattgtcgctaaacgtagaacgcctgagaatcgcgggattatgtttaaaatcgaaattccagataccgaaacagctatcggtaaagcgactgtttcggaaattaaaggttccgctggtggtggagatgctacggagttcccagcgttcgcttgccgcatcgcttatgatgaaacgcctaaggtaacaaaaccctgaggagagcccgtccagcgtcgaagtggacaaggcgactattacgctaaaagttggtgaaacatccactgttactgcctcagtattacctgtcggagcaagtcaagaagtaacttttacttcttcaaatccaccaaaagcaaaagtaaatgctagtggcgtggttgaaggcgtagcagaaggaacagcaaacataactgtcgcatctaaagaaagtccttctatcaacaaagtagtgcaagtaacagtagaagcagcagactaataaatgaagcccttactcaatgtaggggcttttaaattggaggaaatcatacatgacacaaaataatgtaatcaatattcaattagaagaatcatatcaagagtttcagcttggcacggaactgtttagagtcggtttaggtgatgaaatgcgccgcaaatggattgaagcagatgagaagtacaagaagaagctagaaaagctaaataaatacaacattgataatactgacgaaatgagttcagaagaatattttacattagaagaagatgtaaaagaggctttaactgaagcatatgcaattttattggatgacgaaaaagcatttgataaatgttatgcgcaatgcaaagatattttaaaaatgtatcaggtatacaatcaagttgcagaaatcattgtcggttcagtagaaaaacaacaaaatgaaattcaaaagaaatataaagcaaaaatgactaaaaaagcgaagtgatataaatgctttcgctcgcttttggagttaacgatatttacgaatatgaaggaaaagagtataagctcgatttagcttttgacaacgttctaagagtgattgatttaacggaagataatagtttatctgatgtgttcagagctaacctagcaattgatgtgctatttgctgatgatatgccttggccacgttcaaatgaggaagacgaatacgcgaatattgaagaaaaatcactggtacttattgatattttcactaattatattgttaaagaaaacgacgatggtttgctttatgatatcgacggaaacaagatgccaagcgctacaaacaatgaggatgcggaagaaattgcttcatattcattaacgcaagatgcggattatatctacgcttcttttttacaagactacaatattgatttattagatagtcgggggaaaatgcactggtataagtttagagcattgttagaaagtttgcgtgatgatacaacaattaaaacgataatcggcattaggcaagcggaattaccttcggggaaaggaacagaaaaagaacgaaacgaattaattaaactgaaaaacagatataagttaaaagattagaggtgagaacatgagtgatggatcagtagtaattgagattagtttagacgataaaaaagcagataaacaactggatgcgtttgaacaagatttagcgaaagcaggcacaaatgcaggggcggcattagataaagcgtatagagaagcggtatctgatattgctagtcaatcgaaacgattaaaagacacgtttgtaaatgcgtttaaaagcatgggaagtgctggctcaaatgctttaaaagctagtttaaactttatgcgtgaattgccttcaaatgtacaagccgctctatctaaacttgcatcaacagtaaaaactgggttcgtaaacgctgctaaagcatctattacagcgataaaggaacttggaacaagtatcaaaaacacagcggttaatattaaaaacggcttcttttcaattgctaagacagtacaaagtagtattgtgtcagctgttaaagtatcaattaatgtcattaaatccatccccggcgcaattaaaagcgctggaatcagtattaaatcagcattagtaagtagtttgcaagcagctaaatcggctgctatttcttttgctcaaactactgtaaaagttattaaaagtattccaggagctgctaaaacagcggctacagcagtgaaaaacagtttcgtagtagcttacaaagcggtggtagttgctgcttatatgagcgttaaaggaactattagcgctgtgaaagctattcctagcgctacaaaatcagcggcattagcagtaagtagcgcaatgaaaacagcttttagcgctgtatcaagcgcggcgaaaacgacaggaacaacagtgaaatcagcattaaaaacaggctttagcgctgtgaaatccggagctaaagcggcaggccaagctggtatttcagcattaaaaggcctaggaaacattgcgaaaagcactggttctttaattaaaagtggattagtaagcggatttaacgcggcaaaagcggcggcgaaaggtgcaggcgctggaatgcgtgaagcacttaaaaattcagttgaaaagcccgccgaacaagctcgctttagtattctcagattagcagcagcgttcggattaattgcagcaactaaaaatgttgtgggtagcgctattggtcgagttgatacgattgatactgcaactaaatcgttaacagtccttactggttcagcaaaagatgcgcaactagttatgacagaccttacagccgctatcgatggcacaccaatcgcattagatgctgtcgcattaggtgctaaaaaaatggtcgcggcaggcatgaaagcggcgaatgtaaaacctgttttcaccgctattgctgatgcggcgtacggagtcggtaacggttcggaatcaattgaccagatgacagatgcgatttctgcgttacaagcgtctggtgttgcttatgcagacgatattaaccgtttagttgaagcgggtgttcctgcatggcaaattttagcaaattccacaggcaaatctgttggagaaatgaaaaaatatgtttccgagggatctttagaatcaacaaaagctatcgcaatgttgacaaaaggcatcgaagaaggaacgactggaatggctggcaacacggctaaaatggcaggtctagcaaaaacagcaggtaacactattagtggttcatttgcgaacatgaaaaccgcagccgttaagagccttgctaatatcgccgaaaacttaaaaggtccgattatccaagcactagatgttgctaaaaacgcatttaaacagtttgcagcagtaacagcaagtccggaattccagaagaaactttctgatttgattcaaaaaatcaaagagtttataccagttttaatcgagtgggcgccagttttggcgaaagttgccgctggatttgtagcatttaatattattagtagtgtatattctaaagttgctggtttggtaatggcatttagaggcttagcaagcagtggcacgttgctcggtggaattgttaacactgtgaaaggctctttcttggcgcttaaagtcgctctaggttcagctgccgccgcattcggagtaataatcgcagttattggtgcagttatagctgttgcatacggcatgtatgtatcattcaaagaaaacactgcgaatattaaaggctttttatcaactatgtgggatggcgtgaaaaattctttcggtaaaatagtagatgtgttcaaacagatagttgccgcattaaaaccagtaggtagtggatttaaagatgtacttaaatatgttggtgttgctatttgggcgtctcttggtctagttctagctgctgtagttgatattattcaagtattagcacgaattgtgttagtagctattaaagcgctacaggggctgtattatgctataaaagcagcatttcaagctctacattgggatttgaaaggtgctaagaaaagcttagagcaatcaaaagatgcgtttgtcgaagcaggttcagcaataaaagatgcatttaacaaagataattatgcactgactggaacagttgaagcattcaaacaaatgggcggagaagccgaaaaaacagcaaagaaaactgaaacatccggcaagaaaataaaggaaacattaaagcttgtagaaacaactgccaaacaaactgaaacaactgtttcgaagtcgaatcaagcaatagatacgatgctgagcggcggagttgatcagtatggaaagaaacttagtgaaaaaactgagtcattcttaaatgcggctaaagacctttacgaacaatatcaagaagcaactataaagtctcaagataaatatagcgtagctatggaaaaggctcagagtctcgaaggagataaacgtaaaaaagctatagcggatgcaaacgcaacattagtagcagagattgacaaaaataacggtacccttttaactcttcaagcagattatgcaaaattactaaaagggaataaatgggtcgatggtacagaattaacagctcaacaaaagaaatttttacaacaacaaaccgcggatattcaagcagagttagcaaagcaaaatcaactttatgtagaaggaaacttgctaaaattatcaaatggcaagacgttaaatgaaaaagaacgatctacgagtatagaagtgcaaaaaagcttatatgctgatagaaaaaaagcggttgaaacaggcgaaaaagaactagctgatttgaaaaagaaaaaaagtgacgccacaactgaaactgaaaaagcaaactatcaaattcaaatcgacgagcaaacgaagaagaataaaacattggctgaaaacttacaaaaatgggctagtgaaatgaatgctattattgcgaatggtgggactttaaacgcagaaacttttgcaaaaggcttgtcagaaatgggaaatattagcgatgaacaattaagcgcagtttggcaagactttgtaaaagtgagtggctctattgataatacactagctggattagcggctgttatgagtaaacgaggtggagaaggtgttcaagcgtttgttacagcacttcaaagcggagattatacaacagctgcattaaatattaatgatgatgttatgaatactctttcaactttgccaaacggaatgttccaaaacgggcaaagtggcaaggaccaatttatcactgcgattaaatcgggggattttcaaggagctggcaaatttttacttgatggagtgaaattaggagcatctcctctaccaggtgagatgaacaatatcggtaaacaaggcggaaatgcaaacgctgacggtttaaagagtacagctgaagcaaataaaagcgctggtgccgaactcaaaaacaatgcaaaaaatggcgcttttgacccaaatttattcaaaatgacagggtcaaataatgcatccggttttaatagtggtattttggacggaaaaggtaatgcattttcggcaggcactggcattggcaattctgctaaatctggtgctggttccgttgattccagcggagttggttctgattttgcatctggatatgtgaatggtattttgagtggcatgggtgcggttggagaggcggccgcttctttagcaagtaaagcattagcggcagttcagaaaaaacaagactcgcattcacctgctaaaaaatctaaaaaattgggcggagattttggaactggttattcattaggtatctcagaaaaaaataaagcagtgacgaaagcggcgaataatctagtagctagcgctttaggaactgaatcacaaattaagaagctgtctagtacgttgaaagacaaaatatcctcagcgattgacgcgggattacattctaagaataagagcgttggacaacttaaacaagcgaaagcactgaatagcatagaaggctatatcgggcaacaaacaaacaagctagcggcaacagctaaaaaacgtgataaagtagtcgctcaattaaaagccgctaacacaaagatggctgacttgacgaaacaaagtaaagagtatgctgcttcaatcactgaaaaaatgcaaagctatggatcaattagcaacgtagacgcagaaaacccgcagtcaatacaagcggaaatgcagaaacgcttaaaagaaatcaaagcttttcaagcgaatgtggaaaaattgcgcaaaaaaggcgttagtaaagacattataagcgacatcttagaatcgggagtagaaaatggttcatcgtatgcgcaagctcttgctaaatctgatgctaagactatcaaagcgattaatagcactcagaatcaaatcaattcagcgtctaagtcaatgggtaacacagcggctaatgcgatgtatagcgctggtattaacgcggcgaaaggtctaataaacggacttaacagtcagaagaaacaactagaaaacacagctaagagcatcgctaatacaatcactaattcggtgaaaaaggcgcttagaattcattcaccttcgcgcgtggccatcgagcttgggaaattctttactgatggacttggaaatggtgtattagctggcgctaaaggtgcggtgcaatcaactaacaaaatggttgataaagtagtaaacgctgcttctaatttgaccgttccagctataactttgccgaagatttccgcagaaaaagcgctgggcctaaaaagtgttgatctaaacagaactattacagttaagacgattattgataataagacaaaagagtctagcaatgcagatttaatcaaggcaattaaagagtccggggctaaaccagtcattctaaatttagatggcgaagtattagctaacaactctaataatcgaattggcagcatgacagacttaggactatacggaggtggcttactttgaacaaaaaaacagatttatatttaatgcaagcgaataaaattatcaagttaaacgaaaaacataactttgaaataagtgaagtaagtcgcgctagtcctcaaattatcaataattatactagctatgagtttagcgacggcaatcgttcgagtgatagtaatttcgatagcttcgatattgaatttacttgcagattcaaaacaaatggcaatatcgactatcacgttcgacttgatgaattattcgaggatatttttattagaaaagaatactacattttccatacgaaaaccccgggaaaaaaatattgcgttcatccagcacctttcgatattgataggaaaggtgctgggcatgcgcagtttacgttaagatttgaagttttcaaaggttttagcgaatcgttaggcactagcctttcgccttttgctttcagcgagggcatttggcaagcgggacaaggcattgtatcacaaaattataagtataagcacacatcaaacagatttattgtgtataacgcggggagctttgatattgaccctagaatgcacgatttaagaattactattaagaattgtcgaagtgacggcttactaacaattaacaataaaagcactggtgaaaaattcgtattcaatgagaaaatctacgcttatgacacaatcgaactggacggcagtaacatcttgaaaaacggagtgcgttgcgggcggaaaactaatctcggtcttatttcgttattatccggcggaaatgaaatcgaaatcgagaatgtaagcaatatcgaaacaacgtgggattttccgtttttatataaatgatggtgggtgagaatatggacatatttgtaagtgactatgaaaagcaatacaaagagattttaacaggctttgaccctactacattttcagaaacgtgggtcgaaaatcagcaatggcaactagatttttatgtagagaaaacaagaaataatcaagatgttttcgacttattaaatcatgaaagctctgtttatctggatggccaagaatttgttgttaagcagctaaaacgcggcgcagttgggaaaatagtttattcagaagtcacagcaacgcatatttatttcacgatgcaagatgactatcagtacaacgctatttcgggttctaagagtgcaaaagattgtttgacacatattttcgcagctgataaacaaggttttagctttgaactcattgacaaaaacaaggttttagaaaatattacacaagaaaattttgggaatggcaatttactaaagctagttcaagaagtgttggaagattataagcttgttatgctagcagacaataaacgattaacatttattccctctgaagattacggagagcatacagaaaacgaaattcgctacaataagcacacaaacgaagtcgattttgatattgatacgttatccttaagaactcaaattaagggctatggaaaagtcgacagcaacggaaataactactttccgccagttacttttaccagcccggaatcggctaaatggggcgtgcgaattcaagaaccgttatcagacgagcgttatacaacttctagcagcatgctaagacgtttgaagcttgaactacaagactatccagcgacgactggaaatatctctttaaagcttaaatacgaatgcggaaaaggcgattatgtaatgtttgtttatgaaccgctgggccttttatacgaagttcaaatagtcgcttataagaaatacatttttacaaacaaaccgccagaattgacgttatctaataacaaaaaaacaatggtttctatcatggttcaactagcaaaagcaattaagagaggagcgaaatagatggatttaaaaaaatggcaagacccactcatgaactcagaactacagcaaaactataacgataatttagtaaaactagctggaagccttgaaaaagctaatcaagatatgacacatgttaatcagcgcatatctaacttagttattaaatccggcgggaatgaatcgaacgaagtagtagacgcacgcgtttcttctctggttccagaaactgaattcacaacattaaacgatagaataaattacgcggaaaatgctttaataacaggtgtcggaaagctttcaacgaatgtttttgatctaatggataaatacaacgatatagatactattttaaagcgtttatatggcttagatagcagcaatattgaaatatttgtggatgatgcaagaggcgatgatattgcaggaactggtgaaattgatgcaccttttaaaacgataaataaagcagtaatgactttgccccgtgtattgaatagtaactctgtgaatatctggattgttcctggtcggtataatgaagatgtcgttattccgccaatcatgggaggggacatctacattaggtctacaaactttgaaacagtagaccctaccagtagcaccggatgccaagttcgaagtatttctgcgacaggaagtaacggctatttatatattgctggtttagaagaaacgaacacggcaggcacaacgaaaaactacttcattaaagcgacgcgatgcggatttgtaaggattacaaaatgccgaatggccttcaatactaaggcaatagacccgttcactgcggtttttattgatgcttgttctgctgatgtcaacggctgttattttgcctcacaaaatgttgatgttcgcggttataacactgctagagtcgaggttcagaatatcgtccatggcgcaaaaagtgcgattggtttgtatcctcaaagcgccgatattttcaatctcaatagcgggacttgggaagctgatacgcctacgaaactgagtggcgggggagtggttagaacatgactgaaaacgttattcataaaaatggtgtatatgattttaacgtcacaacgcaagaagataaaccacttcaaaaatctgttttttatacgcaagattctggcggaacagctagacttatttttaatatagataaagataatcaagatttagtattatcgtctgctgctgaattagagcttgcaatgattttagcgaaaggaacagagtcagagagtaagtatcttgtgaaaccaactattattgatggtgttaggggaattgcagaatactcacttacagactctcaaatagcacacgctggcaatgctattgctgaattgtatataaaatacaaaaacagtcaagcgatgcgggtatataaattcagttttgagataaaaaaagcattaatagatagcgactttttcccagtatcagaattttatgtggagcgctgggatgattacgaaaaaatattcgatgaatcgttcgagagattaaacactaaattagatgacgttgataaaaaagcagatgatttaaaaacacaatttgatgatatgcagccatcgcaattcgcacaaaaaacagacttaaatgcacatgtaaataatgcggatattcatgtcaccgcagcagataaaacgaactggaattcaaaagaaacagcatctagcgcacaggctaaagcagataaagcacttgctgatgcaaaaacttttttcgaactagctagtgcggtgcaaagcgttactttgacgccaaaaaacggatttgttgcaagtcagcctttagtcgctcgatacattaagtttggcaaccggtttctagttattgttagcggaattgtaggaaaagggaccgggaacgggacaggtatatgtgcaacattgccaacttttttagctcctgatgcgagctggaataaactttattccgctgcacagcagagtacagcagcaagtaatcaagcgaatatatatctaagtgtgagtgctgatataaatattgttggtgttggctcggtagacgtgaacactggacttgacggcataatttatttaactaaagaggtgacaacatgagcgagttaataaaagtttttaaatatgatgcagacggtatttttgaacgtgatgacttaattgttttggaaaaaggggaaaaggttccagatggttatacattaattgcgccgccagttccttctgtaaatccagtttttaatgtaaagacccaaaaatggagtgctggtgaagatgcaagtgttatggaccctcctccactatcagaaatagaaaaattaacacaagattatgcggacttaatgctatatgtggcagaagtcgaacagaagacggaacaaacgcaacaagataatgcaaacttactattatctttggcggaggcaggtgttttgtaaatgattaactggtatgaaaaagtaaaagattattttttaggtggctactatactgaagcagatgttaataaattcgttactttaaaaaagataacgagatcacaagcagatgtaataatcgctatgaaagaagcaaaagccgagtaggcttattttttatgttgaaaataggggatgattgggatgtatgaaggcttaacgaaagtatttgattatgctttagcaaaagaaatgtttttcgcagcgttatttgtcgcactgtttattattttgttgattattaccaaaaggatttgggatgactcaaaaatagtaagagtagaaatgaaagaagagcgggacaaaatggaaacagagcgggagaagcgggataaagaatcgaaagaagaacgagataagtttattagtacgatgaacgaacaacagcgtttaatggacaagcaaaatgacatgatgggacaacaacaacagtcaattgacagtctgtcaaaatccgttggtaagttagcgcataaggtagatttactagaacacaaaattacaaagtgaaggatgatgaaaatggagtttggaaaagagttactagtttatatgacatttttagtagttgtaacacccgtttttgtgcaggcaattaagaaaacggagctaattccttcgaaatggcttccgactgtaagcattcttgtcggggcgattttaggggcattggcaacatctttggatggttctggatcgcttgcaacaatgatttgggcaggtgcattagcaggagctggcggaaccggtttgttcgaacaatttactaatcgagctaaaaaatatggaaaggatgataaataatggcattaacagaggcatggctaattgaaaaagcaaatcgcaaattgaatgctgggggaatgtataaaattacatcggataaaacacgaaatgtaattaaaaaaatggcaaaagaaggtatttatctttgtgttgcgcaaggttaccgctcaacagcggaacaaaatgcgctatatgcacaagggagaaccaaacctggagcaattgttactaatgccaagggcgggcaatctaatcacaactacggggtagctgttgacttgtgcttgtatacaaatgacggaaaagatgttatttgggagtcaacaacttcccggtggaaaaaggttgttgctgctatgaaagcagaagggtttaaatggggcggagactggaaaagttttaaagactatccgcattttgaactatgtgatgctgtaagtggtgagaaaatccctgctgcaacacaaaacactaatacaaattcaaatcgttacgagggtaaagtcattgatagcgcaccactgctaccgaaaatggactttaaatcatcaccattccgcatgtataaggtaggaactgagttcttagtatatgatcataatcaatattggtacaagacgtacatcaacgacaaattatactacatgtataagagcttttgcgatgtcgtagctaaaaaagatgcgaaaggccgcataaaagttcgaattaaaagcgcgaaagaccttcgtattccagtgtggaataacacaaaattgaattctgggaaaattaaatggtatgcacctaatacgaaattagcatggtacaacaacgggaaaggatacctagagctttggtatccgtcagacggctggtattacacagcaaactacttcctaaaataaaacttaaaaatggaggcaacaaagatggtacaaaaaaatatcgtagtagaatcaggagtaaaagtttataaggataaaacgttcaaaaaagtagttgcagagctacctaaaggcgctatttttaaatatgaaagcggattttgcgaattcaaaacaatcaaaggctacacaaatcgcgcaaattggacctgtcctgcgatttctggtagctacgttatcgcactagcaaaagtaacgcaaaagcttgccgaaaaagttggtggcaaaggtgtcattcaaatcacgaaaggcgaaatagttcgcattgatccatctagcttgaaaaacggctatgtgaattgtgctgttttcaacgatgtgtgggagtggggattcaagattaaacttgcagatgttaaacgatgcgaaactttatcctataactcaatagcaaaattataagccaaaagacctcttagctaaaatgctgagaggtttttttatgtttaaaatatatattaaacatagaaaataaaaaataccccgaaaaaattcgaggttgctgttatattcagatgtaaaaaacgggatgtcaaacagctaatagttgaatgaaataaagaacgaaaatcgttcttgtgaatattattacatagatttttatgcaacacaacactttttaagacttgattttaagaacgtttgttcgtataataaagttaagaggtgaagtaaatgtataacttatttgatgatattttagaacattcaatagtattagcagatgcacttaagcgtaactggtcgatagaagtactgtttttaaagaacaatcatcatgtgcggtacaagtatgtagttccagtccacattgataacgaaaaacacattgtgcagcttgaaagatttgacgagcgaataattgacattaatatagaagatattgttttctgcgaggttatgacatgagactatatagctttaatgattttagatatatttgttatgttgaggggaaagatcgtgctgtaaaaaaactatttgctagtttgcggacagacaaagaaattgctatactaaacaaaagaatacaaaaggatacaattaatatagaaaatgtttataaagaatacttgcggggcataaatggggcagagcaaaacaacatataaatacttatagcttcttgtaacagcttttcaaaaggcgtaaaccgcgtaacaaagccgatttcttcccgtgaatgcgtgtaactgctcaacacaaaaccaactcttaatcagcgggtcgggggttcgaaaccctcacaacccatatatgaaaaccgcctaaacaaagcgtttaggcggttttttgtttgtaaacttttaaagtagctggtatatgtcgaaaaacattccgttcatcatattttagttgtacagtccgtcttcctgttatatccttatataagtacataaatacatcatagaaagagagctaatccatgaagatgaagaaatggttcaccgtaattttggtagtagtaatttgctgtgcagtagtattcggaataaagtggttgttatatagagacaaccttgtagaaatgatgaaagttgacggcgttctatatatagtgacgtacgagccggcacaaaaaaaggatgctttggagaaaattggtgagatagagcatagaattcgccattaccgaataccaaataaaaatttcacctctaattatttaagtgaaggaacagaactttataaagcgaaaaatggggatgagattccaaggacaattctgtttaaagagaacggagaatattacattgcatcggaaactatggagcaaaaatagcagttttttagcaaattttgattgaagtcaagcttaaaaatggtgcttctagttgtaaaaaatgaaaattattaataaaaatatgacaatataaactattggaatagtacaatagtgatggttttaataaaaaaagaagcgttatttgatgaaattttatcgaatatcgcttcttttttagctattttgatattgtttgaggaaatcgtttttttttggttctttttgttaattaagttctatcaatgattttgaagttttctgagattttgttcaaacggtaaatgttacgaaatagtgtctaagagagtgtcttttctcgtaaattaggtgtaattgcctgtacgaaaatattttgttttctaagataataagtttgtggtggaatttcagaaaggatgattacacaaatgaagtatattgaataccatgattacattaaaagagatgcgattatttacgcttatttacttgataacttttcttatgtttgcaagcaaattaaagcatgggaaagcattacgatagatagagaacacgtattgttagtaaaaagcggaacattaattgaagaaagtgatggaaagaaaaaaggaatcgttcgctgcttctttcaaaaaaatctcattttcccaactagaaatccagtggtattaaaagctctagaaacttctgaaatttgtttaataagtgcagaaggtgtatttggaaagttggaagaagatcaaattttatcaaacttcttcttacaaatagcagaaaaaaatgaacaagatttaaagaggcaagcgttacttggtattgaaaactcgaaaaataaagttgtctctactctcaattttttattagaaaataacttatctaataccacattaccagttttcccagaatggcttcaaataaatattctggccaaattagcaaactgctccatttccacgatatcttctactgtaaatgaattacacaacaaaggaatgctggatattaaatcttctccatggaaacttaaaggacgcgaaatgagacttgaatactttgaacgagatgttcaaaaagtagcggattaatttaaaaagaaaacaagaaatgaatgttttctaatggtacaagacttgaagcaacatctcaagttcttttccaagcataaaaaatatacacacaaacgaggtggaagtaggacttgaagaaaaatattttagtcgtaattattgtttcagtacttgctataagcgcaattgtttcagcatttttcctaacgcgaaatgatgcttatgctattgaaacggaagggtttacctacagccctaaaggaaaactagttactttttcaccggatgcaaagtacaacgatgcttggcttaataacgaaaaaactatttcggatggaaaagaagtaaagccgatcaatttggcgagaacattatttttaaaagatggacgaattcaatttttaggtaaaagtgtagctattaaaagtgcatcagacctaattgagatgccgtcaaaaacatctgtcactgaaagcaaaggaacgtataaagcaacagacacaaaagacaaagcgattgcacaacttccaaaaggcacagtagttaagcttgctgaaggacgttacattattttagataatgcctatttgaagaacaaaaaaggacttaacaaaaaattacccaaaaacacaatagtttccattgacgagaataagaaagttttattaatgggagaaaaaactttagaagagttagctggcgatgatgcctatattgagatggaaaataatcgttatcaatttgatttaagtaaagaaatattagttagtcaaacggataatgaagaagatattgatattcggtcgattaaagtcgaaatagatgacaaagctgaaaaccgtaatctaaaagcgacaaaagaaacaacagataaaacaacaaaagatgaaacgaaaaaacaagaagaaaaaaacaacgaacaaacaaaaacaaatacaaatacaaatcaagctacaaatgataatacaaataaggcagagggagcaaacggatctgctaatggcggggacactggaacaactactaagggtaacgcaaatgaaggtggaaccacaaaagacaaccaaaatactacagatgtcgataaagcgaatgaaattatcaaaaagctaaacgaggctgaaggactaaagacattccaagtaccaattgtcgatgttgaattagcagttgaaggacaaaaagcttcagcaaaattaaagctaacagactcttccgaacgactgcaatccttggaagcaattctttacgacagtgaaaataaagttgtgaagaaagtagcattaagctcttcaaaagcaaatcaaacttttgattttaatagtttgaaatacggcgaaagctaccaagtcgttgtgcaagggaaatataaatccgccagcgacaaaatacaagagacgattttcttccgccaaacagtagaagctaaaccagttgtattaacgccaaaaattatcgaacgcggcgaaaattatttaacagctgagctaactgcaacagagctatacggcaaaatagatgaattagtcttaagagttaaagaaaacaacagtaatgtagctacttcgaaaacggtgaaagttgatgctaataagctaacgcaaaacggcaaagtagacgttaaatttgattcgttaaatagtagtaaagaatacattattgagatggagaaattagtagttgatggtaaagaagtaactgatgataattggtatttcattgcatctacactaaaagcaaaaccatcaatggcaggaatagacctttcatatagtactgaaaaaggtgaattcactgccgtaccaatcaatctaatcgatacagataattctattactaatatacgctatgtagcttatttagaagaggattacaaagcaaacggccagaatgcaaaagaatatgcttattctgttgtcaatgcaagtcaaaagaaaacggcggtaaaagttggacgtacggttgatatgagcgatggaaattacgtttttgtagcgtacatttctggtaataataatcaatctgactttacgcttgctacaccagtttctaatgccgtagtggtcggattgaaaagtaaaccaactgtagaattttctttgaaagaagcagagcaggacaaactaacaatcaattatgaagtttttgatgcagataatacattactttacgataatttgacgcatccaaccttaaaactttataaatctgatgcacaaggaatgtacgatggaagtccagttgctactgtagatcttagaaataaaaacgagattacaaacttacttgaattcggcggtttagaaagtgaaacttattacgttgttgttatgacagcttcttataacttagatgatggcgcaggaattatggtagatcagcttattggtcaatccggagtgttccaaacgaaagaaatcgcgaaagttaatgctactttcacgttggaatccgtaacgactaaccaagctgaagttaatatcaaattatctgaagccgcgaagaaactaaactccgcgaacttaaaaatctatgataagaaaaataacacattagtaaaaacagttcctctaaatgatgattttaacaagttaatgactgaagatggtgtaacctatctttttgaagaactagctattaataaagaatatctagtaaaagtagaagatggtttagacagcggaatgaaccaagtcccagttgaaggtcaacttgttttcaaaacgaaaaaggcatcaccaataactgataaagtgctacttgattatcaaccgaataaattgaaagtaggcggactagcaggtattgaagctacagaaaaaccactgattgatgattataatgcagttagttccatcacttatcgtatctataaagtagatgacttaaatacgccacttgttgaacaagaagtttcaacagcggctgagtttgaaagacactcttactttgatctaacaaataatgctttaggtcgtggttttgattacgtaattaaagcagaagtaatttggaacgataattatgaagatcatcgtattgaaatcagttccgaaacaattcaaatcaaaaaagaaaaaccaactgttgaatacgaaattttaagaagaacagcgacagaagtaaaactaaatgtttatgtaagagacattgagggcgctattgtacctggaaaacttgaaattactagctcaactggtggttctgaacaacttaaaaatggtaaaaatacagtaacattgccgctttcaagtgaaggagcgacaactattaaaacaactggagactatgttattacagcgggcgaaccagcagtaacaactgactttatgacaaaaactttggtagcgatgaatactactgcaccaaaagctagtgcgcaaatcgcattagatgaaactggtcggtctctaaaaataacacctgaacctgatgatgtggcaaaaagtaatgtaatgaaaacaacctacagtcttcaagaagcaaaaagtacaagcccagattatacagaggctaaaattggtgacgagcaatttgatccacaaaaccttagcttgccattcgggaatgtgtggtttaacaaatcgcatgagttaacactcgatatgaaaatgaactactcagaaaaccgaatgaacaatgagaagttatttgaaaactattatgtttctattgataatagctcggcatttgtaacctcgtctaacggtggcttatctacaacgagaaacctaaatcgtgcagatgtctaccgagtaacgaaaggtccaactgactcagaaggtaatatcgctggtgttaaattcaaaaacatctggacaaacaagtacatcgcatatcgcggtggggttatgataagcaacagtgaaacagccgatccatttagctttagacgtcaagaagacggaagctatgtagcagaactaaatggtcgttatgttgacttctcgtcagggcttgtttctacggaagcagcgggctcaaaaattgatctttattcagcacaagaaggcgtttcacaagtctcgcaagcaattactactaaagctttagtagaaccaaatattactgctgaagaggttagtatttatgacagacgcgttaagttagatgttgttggtgaagataaagataatacaacagttaaaaaagataacgaaaatgagttatttgttaatgcgtacaaagaagatggagaaacacttgtcaaatctgttcgaattgacggcttaccaactcgagacattttcgttacagacctctctcctgacaaaaaatatgtcatcaaagtagaaggtaaatatgatttgttagatggtgaaggtccacagaataaagtttactattctgaaacaataaccacagagaaaagtctaccaagcatggaatcaacaagctactcatggagtccagcttatggagccagaacaatcaaaggaaataacaattttatcgatgaaagtagcgttttaactaatattgagtatcgtttatatgatgcttcaacaataaatgctgagttatctgatttagtagcgctggaacaagaattaggtactaagacgccagctgcaacttttgaaagtttatcgaaaacaccagaatttgatctgtataacagccttggtgctcagaactattctgccggaaaaacttatgtaattgcagcctttatgaaaacaagcctagctaaggcaccaattttcttaagtaatgcacaagcaatttatattaatccgccaagagcagtttcggcaccaatcaagttagaaaacgtttctacgagagaagcaacattgaaattctcttataacgatcctgacagttactttattggtggaacaaataaacagttccaatatgtattaaaagaaacaacgactggtaaaacagttaaaaaaggtgccttcacaggtggaaatacagcaagttggctaaacaccttcgagaacttagaacccgcaacaggttatacattaacaatcagtacaaaatacgataacttgggtggagatggaagtcagtcatggagtaatagtttaaactttacgactgatgctgaatatgtaacctcgaactcacttactattcaacttgatgcagcaactaaacaaatcaagttacaagcaaaagaagtgagtccgggatcaacaaccattgaaaaaatccaaatggagttctacgagttacttgattatggtggtaataacgagcgaacaagtttagttgaaagaaaaacagttactttaccaagttcttaccctggaacagtttctgcaaacttcagtgtcgcaggtaaaaagcaaaatcaaagtttcttaggtaagatggtcatcacttaccgcacacaattaaatgaagttaaaacttatgaaaaaatgtccaactttattaccttgcaagaagatgttgcggcgaacttaaaatcgtttagaaaagtacaaactactgacgaaaaagtaagcgtggcattagatgcgaaggaaatggacaaagatgacaaacaaacttacacgtttgaactaaaagatgaagctggcaaagtactagatacagaaaaagttgcagcgaaagatattgcaaaaacagttgatttatcgattaaaccaactagcaattatgcaataactgttactgatgagaaagataagccagttgctctttaccaaggaaataacgatgaaaataaccttaaagctaatattactaaagatagctttacattgatgaccgaagataccggtgatgcaaaaacagaacttactgtcactattgaaccaaaagaacttactactatggaaaaagtgcagtcgtggttcggaaaagactttaaagaaacaaaaacgattaaaaaagaagatctagatgccggggtcgaaatcgatgcaaattatcatgattcgaaagttactgttaaagaaaaagaatcaggaaaaacttttgggattatcgaactggaggcaagtaaatgaaacctacatggaaaataggtctaatcgttgcagctgttccgttaatcattatttctgtaatcttatgggggtcctttaaggaggcaagatacgatcttgtctccctccctagtaatggtgtggttctaaataatgaacaagaaacattgcaatttcaaaaaggccacacgctttaccgaagctggaatgatgaccagctaatcgctaaaaatgatgaagacgatacgcgtaaccaaattatgcaaagcacgattctttatttagacaaggatgcattaatgtttactaaaagtgtcccagtcattgatataaacggcgtgagtaccaagttaaaaggaagacaagtgtatgaacaaaaagccgcttcctatctatataaaaactccgaaatcgctgaaaaaagtgttgttaaactagctaatcgtcaatatttcttgaatgcagatgcaacactgtaccttggtggaaaagaaattaagaaagtttctaaaccgcttctactaatagataaaactggtagtgtcactatttatgaaaataaaaagaaaagccgttatttaggccatatgacattaaaagttaacgatgaaacggttttagatgctagtaatgaaacttatacaattggcgaacgcaagattgaccttgctagttttggtggaacagacaataagaaaatcgttgttaaaaaagacgaaaaagaagccgaaaataaaaaagctgctgaagataaaaccgaagcaagcgataaaacagcggctaatgacaaagagtcaggaagtaaagcaagtaaccaaaatggatcatcaaatggtggtctaaatgcaacgaagaaatacggaaatgatttaaaggctggcagtggttcatcagaaacagcctctaaaggtaatacgggtggttcacctggaaaagctcaaaaagatttagaggaaattgataattacgaagcagtccttaaaaaaatcgaggaattgaacaagaaattggagcgaaatattccagtactcagaattggatatattgcgcctggcgtaactagtgcgaaagttagctatagttactcggatccaaataataccttgattggagtaactaaaatcagtgttgtagacgaaaaaactggtaaaacagttaacactcgctatgtatcagctgttgatacagaagcaacactaacaggtctttctccaaatgggaagtatcatcttgaattcacttatcagtacgatttaggaacagataaaggcattcaagaagttaaaatgaagagcgaatcttttacaacccaatcagtttcagcagtttaccaaatgcaaagtgttacgagtacgtcaatgaaagtaaacatttctctagatgcacaaatagaagatgtaaaacgcgctcgtatcaaagttaaacaagcaaatggtgattctttctatatgaatgttggtacaaacttcattaacggtaacggagaacttctaaatgtaacagacttatctccaagtaccgcataccaattccaagccatcattgaaatgaaaaatggcgaaacaattgaattaaatagctcagaaaaatactacacaatgcaggcaactgtattaagaagtttacgagctaatttatcagtaaataaagttgttcaagttgagtatgactggaattccacagattacacgataaatcaagctactgttgaattaaaggatgaaaaagatcaatccaaagtagattacaaaatcgttaatcaagaaaaaggaaatattcgcttagtaccaattactgatgaagaaacagttgatttagaggctaaattagtccttaaaacaaccaaaaacaacacaaatgaaacaaaaactttcgaatatccaattaaacaagacattgaatatgacaaagatgcgaaattcactatttctctaacaccgttccaaacagaagataatagtgtaaaacaaacagaagaaacggaacaagaaaaggcacaaaatggcggcttaacaactccaatagaagaagttctggccccgcaaaatgccacttatgacatgaaatttaccatgcagcgcaaagcaggcgagacttatcggattgccatagaaagacgtgcagctggaacagagaatagttggactgcattcagtagcaaagaactgcaagctgacgaatctggtctagtcaatcacatggagacaatctcgaaaattgcgaaagaaaattttgattaccgtgttgcagtttatgacactaatggcgcactgcaactgtacgtatatcaagaatagtagaggggcacatcttcttcgtgccccaatctcaaacagaaagtaggaaaataataatggatttagtagttgcatgtagcgtaattggcgccgcactggcaattgggcttgcgactttaggagctgcaattggacagggaatcgcggttagtagagcaacagaaattatcggaaaaaacccgaatgcaaaaaaagaagttatgggaggtctctttttgggactcctgatgatagttgcattaatgctttttgcactggcaattgcagtcatcttgctttgggttaacccgttcatatgataggtgagagcatggaaaaattgattcaaacaatagtcctttacagtatttttggagtgggtttcttatatttactatattttaccttgcaaaaactggaaaatattttaactagctttttttacgaagttagccaagataagtcacttgaaaaagaaagtttattacgtcgactaaaaagacaaaaggtcgctacaaacaaagaagagcagaaaaataggcaattagctattgaagctgaacaaaaagagactatttttcttgaagaaatcgatcagttagttgctcgaaatagacaatacgaacaagaattacaaatgtggcaaaacgaaaaacctaaacaaattgttgaagttcctagtattgagacaactccacatgcaccatataaatcactaagtagctgtgttactgaaatcatgcaaaaagtatttgttgaatcagaagaagaggaagcgcaattatttacagaagcaattcgtgaatttgatgcactagtacggaccgaaaaaatccgtctggcacttccatataaagtacttttacgtttgttcgaattgcatacttcagaagagctacatgcatttacaaagtcgttcgaaatgttccatgagcgtgcaagtaagctttctgttaaacaaatttatcaaagtagttacttgtcgccggaacaaaagcttaaagttatgcgtgaagacggcacattagatgaattaaatcatgaatttgttgagttcctattctatatgttgacacatttctcttatcgtcaaactcgtggactttacagaaattatttagaggtttataacattcacttttatacagggcttattcgtgtagatgtggctagtgaagatgcagcaaatcattttgataagctgtggcagccaacccatacaaactataaaatcgaatatcaagtacaaaaagaattaattggtggagttattatcaattatggaacaaagtcgattgatatgagctatcaggaactaatcaaacgcacaacagaaaaaatggaagcggaagtgagactttgaaaaatattcattttgatataaacaaatacgaagcccatgtggacttggaatatttaaaagaaaatggcagggttgagaaaatctctgatggtgtaattttttcttcaggattagaaaatgcggcactccaccaagccgttacaatcgatggcagacatcgcggcgtaatcctagaactaaatgaagaatttgttggtatcggcttaattgataaaacaaatgacattttagaaggaatgagtgtttctgttacagatcattttatagaagtaaatctttttgaagatatggctggccgtattattgatactacagggaaaatgctatacgacgtaagcgatgaacagccaactgctagcagcccgctattctgtgtaacgccagcgattatgactattgatagtgtaacgcgtccgctcaatacaggacttgcggttattgattcgataacaccgattggtcgaggtcagcgtcagttaatccttggaaatcgccaatcaggaaaaacgcagattgctgtagatacaataattaatcaacacaatcaaaatgtgcactgtatttacgtagcaattgggttaaaagcagcctatattgcagaggttattgaaacccttcgtaagcatggcgcaatggattattccacagtagtagcgacagcagcaagtgattctcttactgcacagtatttaactccttatgctggaatggccgttgcagaagcgctacgtgatcaaggaaaagacgttttaattatttttgatgatttaactaaacatgcggatgcttatcgagcgattacgttgctctttaatcgtccaccaggaagagaagcatatcctggagatagtttttatattcactcgagtctcttagaacgagcggtacaaatgaatcaggatcatggcggcggctcaatcacagctattccaatgattgaaacactatcggatgacgtaacagcgtatattccaacaaacgttatttctatcacagatggtcagttattcttaaaatccgatttgttcaaccgtggtcaaaaacctgcagtggatgtcggggtatcagtttccagaatcggtggagacgcgcaacatccaattattcgtaaacttagtaagaatttaacgcttatcctttctcagtacgaggaattaaaagaattacttgattttggtaatgcacttgatgatggaagtatgaaaatggtaacagatggccgtatgctaacagagttatttaaacaaaacattttgagcccactatctgtgactgaattaatcaccattttatatgctttccaaaatggctttttaacaaaaatggcgcctgctaatgttcaatcgttcaaaggcttgttattagaaaaagctcatgcgcatcagaagtttgaagaattctcgaaccaaatagaggaaattagtgaactgaatgaatcacacgtcaaaatgttagaagagattattcaggaagcggggaggcctttcagttgagtagcatagatcaagcgcgaaaaaagattaaagcattgaactcaacttataaaattgtccacgtaacggaattagcaacccttggtaaactttctggactacggacaaaagccgaagcagcagttagttattacgaaactatcttgaaaagtttgcgttgggttagaaaaacaatgtacaacggtaataatttacaaacaaccgaagagaagaacgtcactgcccttgcaattacatctgaacgaggactatgcggagcctacaacagtgaagtatttgctgaaatagaccggctgattgaaacacttggaaatcaagttacaatcaattggatcgtagtgggcgaacaaggtcatcgctatttaacgaaactaggtcagaatattagtgaatacttgcagttctcacttgaaaatattgatttggaaacaactacagaagtaacagcagattttattgaccaaatcaataaacaagaaatggatgctttatacgttatcttcacgaaatacttcaatgcagttcattcagaagcaatgtgcgaaaaaatatatccagacattcctgaaggaccagaagcagaaaccattgaagttgattatgtgctagatattgagacagatgatgaacaagtagagcaattgttactagaaaattatctatgtggtctgctttatagtatgtttcgttattcggttgcaagtgagtactgtatgcgccggattgcgatgaaacaagcaaaagataatattcataaacagcatgaagaagccgtttttgatgctagaaaaaaagcattgcaacaaaaaacaggcgagctattagatattattagtggcgcacagacgatcaggaaggaagaagaataaatgaaaaaaaacataggaaccattattagtattagtggttttgttttaaaaatcgaatttaatgagagcgaactacctgaaatcagccatgcgcttgaatataaaacacatcaaggcacctatttagcagaagttgttcaacatacaggaattaacactgtttcagcgattgcgattggtgaagttagtggtctagcccgaggagcagaagttattaatctagggcatcctattgaagttcctgttggagaaactgtacaaggtcgtatgttaaatgtttatgggaaggcaattgatggcttaccagaaccagaagcagaagttaaatggccgatttttcgggaacaacctttacttcgcgaacttgatacaaataaagaaatcctatatacaggcattaaagttatagacttgatttgccccattttaaaaggtggtaaaacaggacttttcggtggtgctggtgtaggaaaatcagtattaatgcaagagttaattaacaatatcagtatgatgggcggaaattccgttttcactggagtaggtgagcgcgtcagagaaggtattggtttatataatgaattagaatcaagtggggttttacctcaaacaacagttgtactcgggcaaatgaatgaatcgcctggcgtacgtatgcgtgtagcacttactggccttacgatagcggaatatttgcgtgatgaagagaaaaaagatgttctcttgtttatcgataatgtttttcgtttcattcaagcaggttctgaagtatcttccttacaaggtaaaatcccaattacaggtggataccaatcgaccctttcaaaagaagttggtgacttccaagaccgcatcgcgtcgactaagaatggttcgattacgtccattcaatgtgtatttttaccagctgatgatattgatgatccttccgctgttgcaacatttagccatttagactcaacgattgtacttgagcgttcgatagcagcattaggtattttcccagctgttaacccgcttcaatcgttctcacgggcacttaatccaacttttgttggggaacgtcattatcagttggcagttcaagtcaaatttattttacaacgttacatggagttgcaagaaattatcaacgttcttggtatggctgagttgagtgatgaggataaaaaactcgttcatcgcgcaaggaaaattcgtaacttcttatcacaaccattttatgtttctgaaaaattcactggtacagaaggaatatttgtggaaattgaagacttgttgagcagcgttgaacgtattttgaatggtgaatatgatgaacgttctgagcgggaattcttgtttatcggatcctacaaagatttgaaataggaggagaggcaaatgaaacttaaaatcgtctcgccgatggggcaattttttgaaggtgatgttgagggctttgttattaacactaaagaaggtcagcaaactgtattagaagaacacatcgattgtttaagttttttcgactatagtgaaatcatcattttagatagtgcagctacagagcctatctttgttgccctcggttatttacatctcgttcaaaatgaagcgaatatcatggctcagtatgcttcaaaagatgccaatcaagctgaacgaatttttgaaaggctcaacaaacgaaaacaaatggagaacaggaggatcacatgataagcggattttttgatacactgctacaaattattgctcttctgtccgcgttttttcttattgttttgctccttcttactggtattcgatattttctatcaaaagatgaagttccattagaaaaaattcaacgttaccaattgtggcataaccgctaccaatttgatgcagaggtgacagcctttcttgtcgttattacggcgacacttctagtatgtttatctgcagtacaaataaccgccattccgttccaatttacattattaatgttttggagtagctggctgtttcatccattttcttattggaaaaaaacgcgtacgccacaaaaactcaaaaaagaaattatgcagctactgggcttagttttaattacagctttgtacttcgctggatactttgcacttaagtcaatgtatttagtacttgtgcaagtagcagaagccccttggcatatccaactcggcgtaagaagttatttaattatatgtagtttacttgtagccagtggagcactaattgtatggcaacgaatttacgctaatttactgaaatagtttaataaaagtctctaaaaatcctgtgtacagaccgtttcttgctaatgaaaacttacgagatttaatgggattaattaaagagaacgggacttgtattactggaaaaatggtctaaaaaattttaaaggagataactttatatgatgaaacttaaaagcttgaggcgtccattattattagtcatggcagctttactgattatcggtcaattgaatctttcgtccttccgagtattcgcggaagaaaaaggtaacgaatcagtttcttatgagatacaaaatgaactttcaagcgacaagaaaaaagctaaattgaagattaaaacaacccctaaaaacgaggaagttaaaatcttaacgatacaaacaccagatggtaaaaaagtagaaggtcaagaagcagaatatacagccacgaaaaatggtactgtggattttgtaattaactatcaagaccaagataaaacagaaaaaacttatactgcttcttatgaagtaaatgatatttctgaagaagtacaaaatacaccgaaaccgactgtcacggaaggaaatactcctaaaaaaggatctaacttgcttaaatcaagcgctcctactgtgtcaatgaaaattcctgattataacaaaacaaattgggagaatggagacattaaagacgtttctgtaacagttgagtttaacaacaacaatgcttctggtaaaaagattaatttcactttgccagacggaatgcgttttgtttctctaccagttccaagtagttatcaagcacctagtagcgtagactcgaatattttaagttattttggcgcaggtaatccagttggagattcgattacttcagtgactgttccaaataaagaaacaggctacaataaagcaacttatggtactttgagctatgaactagatccagctactgaaaaactaactctaaacttctctgtacaagtagatgcagctaaatactatggtcctactgacttgaagtctccaattaaagttgatgcttatatgggagaaggaagtactccagcagcatccgcagagcaaagcattcgtgccgagggtaaaactgttgttggctatgcaaatcaaaaacaggtagacacaatgtttagaaactggtatacatcttcatttttaccagaagtaagtccaagtacagccactgaagattcttataactacactaaaccttattcagttgtaaatggtatcagccaaatggatggacgtggttcaaaaatctttgttcctaaaaacgttaaaactactctttattacccagaaggtatggagtatgtaggcgtagttaatgaaaacaagagtttactaacaaacaacgaaaatagaacaatcacgcattatccaaacgaaaataaagtagaaattgactttaaacaagaaaattactacggtattattgaaactattttagcagtaaaatacaaggtaccagaaggaacagaagaagggacttatacttctcctaaagtaccacatgcagttattacgacatatgatgataaagtgtttgaaacagatgcattaactaatgatgcaagtgatacaacaacactagctgcaaaagacacatgtaaagtagtaggtaaagcagcaaataaaatggttatgctaccaagaaactactatataaatccagataacgaatcttgggcgggacttattcaaatcaataataggcaaactgccggagtgaaaacaaaccaaatttaccaaattaaatttgatgaaaactgggaagcctatactgtcaacataccttttgatggaacttacccaggtaataaagtaaaagacgtacagtataaaacgaacttaaattcggaatatcgaacttacgatggtactcttccgaaaacaaatggtaataaaatgcttactttagatgcaacagcagttggacttcaagaaggcgagtactttactgaagtaaaagctaacgttggagacttctctgtaggtttcactaatattgacacagctgccccatttaaagcagcaaattctgcttcatacgggattgttaaaccaggtattacatctgttcaatttgacgtgaatatttggaacgcagatgatgaagaaaatacaaaagtttcaggatcatccacatatacagttgctaataatataagtacggcagcaaatgggacagcttcattctataatagtgaaggcacaccaattaaaactgctcgtgcaggagaaacagtaacaactaaagcatcattagttatgcatgattatccttatggaacaagatctgttcttaataatccggaagtttatctacgccaattagaaggaactacggttaaaccatcttccattaaattaacagaccaagatggcaaagaagttgatttcacagtagaagcaaaaactgctaaaaatggcgataaagtttatgtcattaaaacaaaagatataacagtaggggaatttgttggttatccatccaaaaaacaatatttgaatatcagctataacaccacatttgatatgacattaagtaaaagcattcacactgatattcaagaattacttgcttggggcggaagtaacgtaatttctgcactaggagcgaacgtcttcctagataatggattagacgtaaaccaaaatggtagagatgcggaacgtttactttcaactaatacaagtactctaagtgttccgaaacaagatacagttgccgtagagactttcttaaatgtagccggagaaggaattaaagctggttatgtagaaggcgatgacagtactgtttcctatttcacacctggaactgacgctgattatatggttaaaattacgaatacttctagcggtagcgcaagtagcttagatatttttatcccaattccaaaaactggacaagactttggtacaaaattccaaagtgaacctttcaaatgggacatgaagctaaacggagaagttcctatgacagctcagcaaaaatctcagtttgatttaacctatactgcggatgccactgcagataattatacgtctgatagcatttacagtaatacactcactgattacggaaaagctaacatggttcgtatcaaagttaaaactaaaattgagtcaggcgaatctcaaacaatcaaagtaccactgaaagtagatgaaacatttgaatctgctacagctggtaacaaaattggtgaacgtgatgtatacaacccttactatgcagttgaaactaacacttattctggttcaatcgcaggaactcgagtaggagcagagttagtaattgtagaagtagcaggtaagttattcaaagataaaaacgcgagtggtatttatgaaaccgcacaaggcgatacaccactagcaaatgaaacagttgaattatacaaatgggatgaagctacatccacctatgaaccattcaccaaagatggacaaaatgtaacaacaacaaccgatgccgatggaaaatataagtttgattataatttaggaattggttacggaaaatatgctgtgaaattccctgaaaaagcaggttacaagcatacgttacaaaatgttggtagagataaagacttaaatagtgcagcaccaaatatgggtactgaaattggttgggttaaagatattgatccagcacaaccagatgctcagcacattaatgcagggtacatttcttacgttcctgaaacagatttaaaagttaacttaaatgaaaaaacagttcaagaaggtaagagcctgaaaatcactttaccaaaagtagctcctacaagtggtgaagcagcagaagatacaattgaaccagacattttccaaaaaatccaagctaacacagatgggtataagtggactacagctgatgcttccgtagcaacagcgaaaacactaactgatggttctgtcgcaattgtaggtggttctacgaatgggaaaacaattagggttacagatttaacaattgctcttaaagatatttttggcacagagaaaaaatcaactgcccctctttatgtaacaacagcaaacggtaaagttgctcaaaaagatgaacttaaaattggagcaactaacttcacattagaatacaaagatgcagttgtccttagtgaagcacaagcagtaactaaagccaaaacagcagcatttgaagaagtgaaaaacggtgtgaattcagacgctgaagatcgcacagatgttgttaaagtagacgaacaacaattaaaagctcttaaaaacggttctaaccgcggtggtacgtatccactaacatttactcttgaaaaaaatggtaaagaagttgaaacagttattgatgtaaaagtagaaaaagacctaacagaagtaaatgctcatgattctactatttatgttggagataactggcgtgcggctgataactttgatagtgcgctaaataaagaaggcgaaacgcttacttttgcggacatcgaggctactggaacagttgatacaacaaaagcgggtgaatatccggtcacttataaatacaatgatactactaaaacagtaactatcacggtaaaagatgatgcgaccgaaattaacgcgcatgattccacaatctatacaggcgatacttggagtgcaaaagataacttcgatagcgctgcagatagagatggaaatgaagtagctttatcaaaagtaacagttactaatacagttaatacagcacaagctggcacttacccaatcacgtatacgtatggtggtgtatcaaaaactattacagtaacagttaaagaaaataaaaaaggaattaatgcccataacgctacaatttatgtaggagatagctggacagcagaagataattttgataatgctgttgataaagatggcaatccagtagaattttcaaaagtaacagtaactgaaacacctaatgttaatactaataaagcaggaacttatcaattgaaatatacttttgatggagcttccaaaacagttactcttacagttaaaaatattcaaaccgctgttaatgcccacaactccacagtttatgtaggagaaacatgggaagcgaaggataacttcgacagtgcacgaaataaagacggagaaacagtcgcttttgcagatgtagaagtagaaggaaatgtggatatgaccgtagcaggaacatattcaatcacttacaaatacgacggtttttctaaaacaattaaagtaacagttaaaaatccacaaactgcaataactgcacatgattctgtggtttatacaggagacaattggagtgctaaagataactttgatagtgcaattgataaggctgggaaaccagtagcttatagggatattacggtggaagaagatccaacagtggacttaaatacaccaggaacctactcagtaacgtataaatatcaaggtatatctaaagtagtacaaattactgtgaaaccaagacaaactaaagtagaatctcacgatagcacgatttatgcaggagcaagttggaacgccaaagacaacttcgattcagcgatagataaaaaaggcgatgacgtcaaactatctgatgtgactgtaattggccgtgttgataaccaaacaccaggcacatatgaaatcacttaccgttatgatggtgtaacaagcgtttctcgcgtgactgttctacaaaatcatgccaaaatcattgttaatgatagtaagctgaaaataaatgcagattgggatgcgaaagataatttcgttcgcgcaatgtctagagacggtagcgaaattccaatgtctaaagtaaaagttgaaggtaaagttaatacgaaaaaagctgggaaataccaagtaacttatacgattgatcctaatgaaggaacagtagatgctggtaaagaagagctttctgttacagctacaatcgaagtagtagaaggaaaagtagcgataactccatcagaaaatagcaattcagatgtaaaacctggtaagcaaaagacagcaacataccaacaagcaataccaagaacaggggaccaaatgaatttatgggttgttgtaatgggcgcttgcctagtaggatttgcgctgttcctatggacgtttagacaaagaagacgtcacggataattgaaagaatagtttcggggaggtaggtatgtcaggtttagactagcctaccttttccggacatttaaacaagtttttctatagagagttagttatacagataatacggttcaaccgatagccaagggttttagacatctaggaggaaaggaagtagaaaaatgacctttttagaatttcatcaactaatcagccaagattcactgatttattcatggattaggaaaaatttttcttttgttcaccaggagttggaggcaggtaaggaacttaaaatgcagcatgaacaactaatcattatggaaaaaggcctgctaatacaaaaaagcgaagaagataagaagcttacttttcaacgagtattcgcggatcaacggattatttttacgacaggtggaagtcttacattaggtgctctagaagatacggtttatagcgttatccctacagacgaattgtttgagaaattggatgagcatcaattgttacctaatttctttttacaaatagctgaagattttgaggtaagtatcgaatggcaaagaaagttaatgtcggcttatccagaggaacgggtcagaatggttttgagaaaagtaattgaacgatacaaactagatcccgtgcacaatccagtatttccaagatggcttaaaatttatgttctagcaaagttcgcaaaatgttccgtctcaacaacttctatgatagtaaatgatttagctgagaagggtgaaattaatgttaaaatgactccttggatattaatgcaggattcaccagcatattgtgtctcttaataaaactataaaaaactactcaaattcaatttttgagtagtttttttgttttttagtagggttaatatgaaattaataacttttttcaatatactttattcattttttagatacactaaaatttgagtatctattttctgtattaatgagcgatacactatttaatatctttataatttagaatgataaagtattggtaaataagggttttggatgcaatactaataagttggcacagaacttgcaatatattaagcgggtagcaaaataaatgaattatattaggagggaaaaagatggtaggaattatcctcgcaactcacggtgaatttgctgaaggtattttgcagtccggaacaatgattttcggcgagcaagaaaacgttaaagcaatcactttgatgccaagcgaaggtccagaagacatcaaagctaaaatggaagctgcaattgcatcctttgatagccaagatgaagttttattcttagtggatctttggggaggcacaccattcaatcaagcaaacggtctttatgaattacataaagataagtgggcaatcgtagcaggacttaatttgccaatgctgattgaagctttctcatcacgtttcacaatggaaagcgcacacgaaatcgcagcaaatatccttgcgccagctcaagaaggtatccgcgtgaaaccagaagaacttcagccgcaagtaacagctactgaacaaccacaagcagaaatcgctgcagttggtgatggcaaaattgaattcgttttaactcgtgttgattctcgtctcttgcatggtcaagtagccactgcttggacaaaagcaacacacccaacaagaatcatcgtcgtttcagatgcagttgcaaaagacgatcttcgtaaaaaattaatcgaacaagcagcaccaccaggagtaaaagctaacgttatcccagtccaaaaaatgattgagatttcaaaagatccacgtttcggcaatacaaaagcacttttattattcgaaaatcctcaagatgttttacgcgcaattgaaggtggcgtagaaatcgaacaagtaaacgttggttccatggctcactctgtaggtaaagttgttgttagcaaagtactttccatggggaaagatgatgtagccacttttgaaaaattaaaagaaaaaggcgttaaattcgatgtgcgtaaagtccctaatgactcaagcgctaacatggaagacatcatcaaaaaagcaaaaaatgaactaaagacacaataaaaaattaaaataggaggtttattatgtctgtcatatcaataattttagtagtacttattgcatttttagcaggtatcgaaggaattctagatgaatttcagttccatcagccattaatcgcatgtacattaattggtctcgtaacaggtaacttaacagcatgtatcatccttggcggaactctacaaatgatcgcacttggatgggcaaacatcggagcagccgtagcaccagatgccgcgcttgcctcagtagcttcagcaattatattagttttaggtggacaaggggtagcaggtattccgtccgcaatcgcaattgcaattccgcttgcagtagcaggtcttttcttaactatgatcgttcgtacattggcagttccaattgttcacttgatggacagagccgctgaaaaagggaatattcgcaccgtagagtggttacatatttcagcaatttgtatgcaaggtattcgtatcgcaatccctgcagcagcacttttattcattccagcagacagcgttcaatctttcttagaagcaatgccagcttggttaacagatggtatggctatcggtggaggaatggtagttgccgttggttatgcgcttgttattaacatgatggctactaaagaagtatggccgttcttcgttatcggtttcgtagtagctgcaatttctcaacttacacttatcgcaattggtgctctaggtgttgcacttgctcttatttaccttaacctatctaaaatgggtggcggtaattcaaatggcggtggaggcggaaactcacgcgatccactcggcgatatattaaacgactattaataaaaaaaggaggagaatagaatggcagaaaaaatcgaattatcaaagagagatcgtctacgcgtagcatggcgctctacgttcattcaaggttcatggaactacgaacgtatgcaaaatggtggctgggcattctctatgattcccgctattaaaaaattatataaaacaaaagaagaccgttcatctgcgttaaaacgtcatttagaattctttaatacacatccatatattgcatctccaattcttggggtaacacttgcacttgaagaagaacgtgcaaatggtgcagaagttgatgatgtagcaattcaaggggttaaagttggtatgatgggacctctagctggtgttggtgatccagtattctggtttacaattcgtccaatgttaggtgcattaggtgcttctcttgccttgagtggaaacattcttggacctatcttattcttcgttgcttggaacgtaatccgttggggcttcatgtggtatacacaagaattcggctacaaagctggttctaaaattactgatgacctttctggtggattactgcaagacattacaaaaggtgcttcgatactcgggatgttcgtcctcgccgccttggtgcagagatgggtaaatatccagtttgcgccaattatctcgaaagttaaacttgatgaaggtgcgtatattgattggagtcatcttccacaaggtgcacaaggtatcaaaactgctttagaacaacaacaagcaggattagctctttctgaaattaaagtaacaaccttgcaaaataacttggataacttaatcccaggacttgcagcagtagctcttacattcctatgtatgtggttacttaagaaaaaaatcagcccaattatcatcattctaggtctattcgtagttggtatagttggtcacttaatcgggcttctgtaaaaataagctgatcgaaaagaggctggtgcaatattcaccgagcctcttttcgtttagatatatgacacagataaacgaatacggtataataaacaaaacaagcgaaaagaaatggagcgaatacagttggttcaatcgattaatacaaaggtagacttaacaatagatgccaccgcgtatactggacttacagattacgggaaaattatgattggcgacaaaggttttgaatttttcaactcacgtgatgtgcgtaaattcgtccaaatcccttgggaagaagtagatcaagttattgtatccgttatgctaaaaggtaagtggatccctcgctacgccattaaaacaaagcgcaacggcacatacacatttgcttctaaaaagcctaaagaagttttacgtaaaataagagtttatgtcgacccagccaatatggtgagctcgctaagtttctttgatgttatgaagcgctcgtttcggtcgatatttagcaagaagaaaaacaaaaataaataagccgatttataccgaaaagcttcaatggactgatgtctgttgatgcttttttttcgtacataataattgaacaaacagcgcattttggtacaatagaaagtgaaatcaaaagtaaacgaaggaggaacaccaacatgaaaaaaccaagaatctacacgatgtcattcgctagtgtataccctctttacatacaaaaagtggagaaaaaagatcgcacaaaagaagaagtggatgaagttattttttggctaactggctatgaccaagcttccttacaaaaagccatagatcaagaaatcgactttgagacttttttcgagcaagcaccaaaaatgaatcccaatgcctctttaatcaccggagttatatgtggctaccgagtggaagaaattgaagataaacttatgcaacaaatacgatacctagataaattagttgatgaacttgcaaaaggaaagaaaatggagaagattttaagaaaataagtaaaaagcagccgttttgaatggctgcttttttgttggttagcttttagaaactttcttttttaaagctgctaatgaattcgctacttttaaagtcgttttcacagattttcggtttaatgtgccttgataatgtctgattttatttgtaagttcatgatttttctttagcgtcagctgtaatttttgtgtagtatctgtcagttgtttttctaattgttgatttttttcttgtgattcagtaattttctgttggtattttttgttttgctcagaagttgtttttttcagttgggtgagttggttatttacgaggttgacgcggtatcttgtgctaaaatcatgtctttcttttaataagttggtggagatttttactcggtttagcatttcttgaggatttaatatggaaatggggtctggacttgatgggaaagtaatggagtttataagttcatccataggagctgattttctgtttttatcgtgtttgtagatatgattgagaccgtttgtatctaagaaatcaatatagttatcaaaattccttgcttggactttttcggctgatttcaggtccactttagtcagtaattcttggaggttgcttgttttttccaattcatcgatggtgacgtgaggaagcgcatggtaggaggctagttcacgcattctagcatcttggacaaatgaaatattaggtgttccgactattgttggaatgacatttccatgtaagcgagagccaatgctaaaatcaatatttttcacaaaatcgaaccaactaggcatgctagtgaaatattttactcgaccttcttgataatacttatgttggatatttgttgggtagccattgatatcactagagatatctggaccgccagcatacattaaatggaattcgtctaggtgttgagggataaattggtaatctttatatgtattaatcaagttgtttaagaactcgatagctatatctgaagaggttggagatgcgttgatagcaatggaggattgttctgttaagtggagttctctgatttttatttctcgaccaaatgtataaagggaaggacagccgattactcgatagtctataccttcattaaatccgagtttttttaaataatctgctgtaatctgtcctcgaactcctatttgagccgatttttcaaggactgcttttacaaaattagtaacatcttcatcaaaagtgaaaccttcatctaactgaggttcatagtttgctcgtaaacctacccctgtgactacaaccgggatttttagcttacgaatcaactgagtataattacggagcgcgggtcgaaaatcttcacggaaagcatcagctagaggcacaatgtacaaatcgtaatgttcattaattttttctgctaaattaggattagaagataacccatcagcgtgtatttctacattgtcattccataaagtcctataaatgctgtattggtaagctagattaccattattaaatcctgttcgatcctttaaataaatatcttcaggcatgtatacgtttgtagggcgcatacctgacctaatgagtattcttttcactaaaaaaccacatccttaacctagttaatatttaaagtatatcaaaatattaattaagttaacaatttccgggatgaagttatttaagtttatttttacacgaatcaaagaagaaaccgatttgttccactagtccttcgttaaccgaataaatatgcgttgtccctttctttcttaaattaattagttgtgcttctttaagcagtttaatgtggtgtgacatggttgatttggaaatattgtatgtttcgccagagaaacgtttttctttgctttttagtaaacataggaaaatatccaggcgaattggatcgctcagggcttggaaaattaataataaatctgattttgatagctcatttaactttttcatatgattatcatatcataacttacattttaattgcgcggaacttgctgttatgttatattatgatagttcgaaaaaaatcgaactatcaaatccgaaagaagttgttggtaaatgttgcatattgaagcacaaatgacgataaaaaaagagcaaatagaagcttttttgcaggcagctaaggaagttattgccgcgtcacaagcagaaacaggaaatcatggctatgaattagtacaatctactgaaaatgagacagttttttatatgctagaaaaatgggcggatatggatgctattcaacaacacaatgaaagcgagcatttcaaaaaatttcagaacgccgctactaattttgttgcaaaaccacttgaaatttcagttttaacgccacttgcgcgataaggaggagaaagagatgacttatttaaataatgattttgaagacttaatgaaaaaccgtcgttcgattcgagaatacgatgaaacggtgaaaattagccaagaagaaatgaaagctattttggaggatgcggtaactgctccgtcatctgtaaatatgcagccgtggcgctttgtagttgtagaaagtgatgctggtaaagaaaaattaagttcattagtacgctttaacacacgccaaaacgaaacttcttccgcaatgatcttaattttcggggacctacaaaactttgaaaatggcgaaaaaatttacggggaagctgtgaatcgcggtttaatgcccgccgaaataaaagaacaacaaatggcaaaattaagccagtactttgaaacaattccgcgttcggaagcagaacgagttgtattaattgatggtggtctagtggcgatgcagttaatgttggttgcacgtgcgcatggttatgacacaaatccaattggtggttttgagcgtaaagaagtgacagaagcgtttaacatggatccagaacgctacgtcccagttatgctcgtttctatcggaaaagctaaaaattctggctacgagtcatatcgtttaccaatcacagacgtaacgactttcgcttaaagggtggaacaagggaatagccgatatttccttgttcctttttgttcttcttggtataataaaaacaacataaagccgaggaggaaaagcaactatgacgatcaaaataactcgtaaaacaggtattggcggcggtattactccagtgaaaattagaatcgaaaatgaagaaattgtaaaactcgacaatcatcagtctcatttttttatgcctaagatggagaaaacaaaggttcgcgtgactgattggttctttgggagtcaggaagtagttttggaaaatagtaatgatgttattgtgcggattaaccgtaaagcactaatattaaattattcaatgttcccgtttctaatttacggtttagttatgactagtttggcttctacgttaattgcactcggtctctttttggtatcaattttttattcgcgaaagcattggtttgaatttgtgaaaattaaataataattaattgatagtataagccaagtgcttgtactatttttttatctgtgtaagtttttattccatctgtgtatcttaggaacaagcttgaaaccgctaaatgacaacgctttcttttggcatgataattgcatgttatacagttgctcagaatgaatctttaattggagggaggaacttagagaaaagaaacattctggcaaccacacaaaaaggggtacagagagacaaacttagaactaccgaaatgaggtttataaatcaaaaatcggggtgaagagatgaataagaagatgaaaaagctttttagtattacttctgttgtgttgttagtattatcgttagtggttgtatcaattggtgcagagtcaaaacgggcgaaagcggctgaaaatgtaccacaatatcgaaatgttatgtattacggtgattggtcgatttggggaggagaagggaatttttatccgaaagatattccagctgatcaattaacacatttaaattttgctttcttggattttaatagtaatggagatttagtttttactgataaagatgctgctgtcggagcgcctgttggacaagagggagttcagtggggcggagcgaatgcgggtgtattgaatgcgattcaagatttgcgcgctcaaaatccgaatttgaaaataggggtttcggttggaggctggtctaagtcgggtgatttctcgacagttgcagcagatccgacaaaacgggctaattttgtcaaaaatgtgatgaaatttgtgaaatatactaatatggattttgttgatttggactgggaatatcctgcttcggtacgggatgctgaccttgttgataataaaaatgatgaaggcacgccaaatgcaaaacctgcggataagcaaaactttattacacttttacaagatttaagaacagctttggataaacaaggcgttgatattaacaagaaatacgagttatcggtcgctttaccagctgcaaaatctactttggaaaatggagtggatgtagcgaatctgtttaaagtagtcgattttgcgaatgtgatgacctatgatttaaatggtgcttggacaccgaatagtgcgcatcatacagcgctttacggcaatccgaaagacccgaattacaatagtggtttttctgtggaccaaaccgtaaaatacttaaaagaaaagggagccgtttcgaataaaattgttgttggggcagcattttatactcgaggctggaataaagtagctgcgggaacagacactgcattgccaggacttttccaagcggctgaaaaaacgaataaggatgcagatggctcgctcacttatggggcaaacaatgaaaacccaattaaaactggtgatgggggccgtgctggtggagtttgggcgtatagaagtattgatgctctaaaagccaagacgccaactttaaaagaatattgggatgatactgccaaagcgccgtatctttatagtaaggaaactggggagttttacacatatgacaatacgcgttcaattggctataaggcacagtatgtaaaagataataatctaggtgggatgatttcttggatgcagtcgcaggataaaaccacgacttcaactaagcgcgatgaacttacaaaggctattaaaaccggattgttcggtacaagtgcaatcccgcaaaacgcaatcacatatgcgaatttaaatgtggtagcaactgtaaaaccttatagtgaaaatggagtcggatacgaaattacgattactaataatgaaaaagcggatgaaacaaatgaagtcttgaaatcaacagagctatcttttgaaacagtaaaattacctaagttttatattccagtaaaagccggcgaaacgcttactgctggagattataaagcaggtacggttactacttcaggtggcaatacagtagttgatttagcttcggtgtatgatgcacagcaaattccgcaaggcgcatcttatactttccgcttaaaatcgagtgcatctagtgtggatgtaaataatatttctaaaattgatttaacacaacggatggtaaaatcgagtgtcgaatttggtaaacaaactatttttggcgggggaactgttgtacctgatccaagcgatacagaagctccaacagtgccaaaatcactcgcatcttctaatgtaaccgataaatctgttactctatcgtggacagcttcaacggacaataaagcggtggctggatataaagtgtaccgaaatgggaccgaagtgggctctgtttcaggaactacttttacagatagtggcttaactgcaaaaacagcgtacacttacacagtaaaagcgtatgatgcggctgggaatttctcggcagcaagctcggccttaactgtgacaacgcttgacgcggcaacaccaccagcaactccagcatgggacgctgccaaaacgtacaataagggagacagggtttcttataaagggaaaacatatgaagcacagtggtggactcagggaaatgagccaggagctgaacagtggggtccttggttgttaataaattaatagacaaaaacagagattcttttaggagaatctctgtttttatttgaattcctctgataataaccagtcaacaatataaataattggaattccatctatttgagttgtttcataatatctaccagtgacaacaatctttttataattatccttaatatttaaaagattatctgtttcatgcctgttatttggaaattcataagctacttggatgtataatgtttcgtctagctttctagcaacaaaatctatttctttactatcaagtttaccaacgtctactgtatagcctctacgtaataattctatataaacgatattctctaagcgattactatagttcccatcttttctaccaaccgcatttcttcttaaaccggtgtctattataaaatattttccgttagttctcagatattctcgcccacgaatatcatattgttttgctctataaaataaataaccattctctagtaaatccaaataacgatttacagtatggacagttgtgtcaacgccctcactttttaaggtgtttacaattttcgaggcattaactaattggccaacattatctgctaaaaatcgaatgatggattttaaagcggtagcatcttttacccccgctcttaatgcaacatcattcaaaacaatagtgtcaaaaattccggataagatagtatctttgatagattcttcggcaataacaacactcggaaagccgccgtatttttcgtattcattataagcgctgtctacttttcgagaatcagcttcaataccttttacatgtaaaaactcagaaaatgaaaatgggtaaatggggatttcgatgtaacgaccgcttagaagggtagctatttcaccggaaagcatattagcgtttgatccagtgatgataatatcactattgaagctcacacgaataccattaacaacgcgctgccaaccttcgaccatttggatttcatcaaatagtaagtaaacctttttatcatctttgggcaacaattcgtctaatttttgacgaaatttttcttctgttgttattgtttgatattcaaagctctcgaaatttatgtgtataatatgattttccggtatgccttctttcaataaatactctttataaagcattaataataccgatttcccagaacgacgcacacctgtaataacttttatgaaatcggaatccttgaattgaataagttgcttgagataattaggtcgtttaaacatttacatccctccaatctagtaaacttctatttagtttttattttaccattatttgcagttaacttcaaataatggatgaaattagtgatttttgaagtttgaaaaatgctgatttggcagttttatgatatattatttagtttcgatgcgcaaaataaaaggtaactagaatctctagttaccttttttctataaagcttgcaacatatcaaattgtgattggtataaattatagtaatagccatgttgtgccatcagttcttcgtggctgcctgcttcttgaattcgaccattatcaatgtaaaagatgcgcgaactatttttgattgtcgaaagcctgtgcgcgataatgaaggaagttcggccttccagtagtcgctcaagcccttcttggagtaagatttctgtttgtgtatcaatacttgaagttgcttcatcaaggataaggattttcgggtcggctaaaagagcacgggcaaaggaaatcagttgtcgctgaccggccgaaagagtgctaccccgttcttttacttcggtatagtagccatcttttagaccggaaatgaaatcatgggcgcgaacgactttggcagctgcgataatttcttcttcggttgcatctagtttgccgtagcgaatattttcaataattgttccggagaaaataaaagtatcttggagcatgacgcccatttgtgacctaagcgacctgagcgttacttcctcgacattttccccatcaactaaaatctccccggaattaatattgtaaaaacggctgagcaaattaataattgtcgtttttccagcaccagtcggaccaacgagtgcaattgattcgcccgcgtcaacatgaaaattaattccttttaaaatgtctacgccttcctcgtaacggaaataaacatctttaaagtcaacatttccgacgattggtggcatttttttcgcatttggcacgtctttaatatctggttcgacatccattgtttcgaaaatccgctccaaataagtcgttgcggtaataagcgaattgtagaagttaccaatattaataacaggattccaaaaattcccaacataaccgataaaagcaatcagtgtcccggtagaaacgtccacaccgtaacctttgattccaacgaagtaaattaaacaagtcgtcattacggcgatattttgaactcctggccaaagcaagaattgaattttcaccgctttcatccaagaacgacggtactcattacttacctcggtgaaaatctcaaaattctcttcttcccgcgaaaaactttgcgttactttaatcccagcaatgctctcgtggatataagcgttcatgttggattgtttattgctaagaacctgatacgccttacgctgagccgttttaataaccataacaatcacgaaaagaactggaattaatgctaaactatacaacgttaaaacgggatcaatcatcagcataaagccaagtgttacaatgacacttaaaatatcagaaatcaaattaataagcccgttagataataaatcgctcagcatattgatataattaacaacccgaatcaagattttcccgtgcggacgactatcaaaataagaaaaaggaagtttttgcaaatgaccgaaaattgccgttctcatatcctttaaaatatcttgtccaataagcgtaatcgacctaattcggtatcgcatacaaagcccagttacaatgacagaaacaatgaaaataaccgcaatccaaaatagttgagtcatgtttttgtttgggatcgtttcatcaatcacaactttggttagatatggcccaatcattgtcgcaacatttgccagtaagattacaaaaagtgtgatatagatagatttttgatagggttttacatatacgagaatacgtttcaaatgtgcggcgctgaatgctgtttctagttcttcatcaatatcaaatttatttctagccattcacattcgcctccgtcccaagttgtttattgtaaatatcaaaataataacctttttccgctaataaacttgcatgtgttccacgttcaataatttcaccatgatttaaaattaaaatttcatcagcttcttttacagaagatatgcggtgcgcgataataaaggttgttgtattttcggtgattttctttaattcgccttggattttcacttctgtttccatgtcaaccgcagaagtggtatcatccaaaatcaaaatagatggattttttaaaagagcacgagctaacgatatacgctgcttttgcccgccggaaagcccaaccccgcgttcaccgacaatcgtgtcataactctctggcattgtctcaataaagtggtcggcatcagcaattcgcgccattttccggacatcttccatcgttgcttcgggtgctccaaatgctatattaccttcaatcgtatcggaaaacaggaaaatatcttgcatcaccgtagcaatgtgatttcgaagttcccggacatgccattttcgggcatcaaccccgtcaattaaaatttcaccagaagtcggatcgtaaaagcgacaaatcaagttgacgagcgttgatttccctgacccagtttctcccaaaatagccaccgtttgacccggagaagctttcaaagaaatatttttcagaacgtccgtatttgggtcatcttcaaaatgaaaactaacattattgaactcaacatggccttgtaatgatggcgccggtttttcagcgtggataggaattttagcattcgttgccatcatatcttgaattttaaacgaagaagcgatgaaacgttgtacgtcattaataagccagccactcatgcgcatcgggccattcagcatccatagaaatccattaaaggcaactagatctcccagcgtcatttgtcctttgattactaaataaccaccgaaaataagcgtgataacaactagaactccagcgagcgagtcaagcactggcaagtaggctctagaaacatctgcggaatctaaattgcgttttttgaagtcttcattatgttcgtggaatttcttcatttcaaaatcttcccgcgcgaatgcttttacgacgcggtttccacttatattttcttctaccattgaattaagccgcgaaaagctttctcgaatttcataaaaaactggttgtgctttactcgacattttcatcgttaaaatggcaatgagtggcgtgatgataactagtgcgagcgttagtttccagtcaatcgtggccataataataattgcaaagctaaacaggaacacgttttccaaaatattgtacgatacccatgaaacaaaatggcggatcgcatctgtatcaccagtcatccgcgccataatatctccaacacgcgtattattgaaaaaatcaaaatcaagtgactgcaactttttatacaaatcttcccgaatttgaaaaagggaattttgcccaattcgctcgcacataatctgataggaataacggcaaatagttcgaataatggtcgaaactatcatgattaaaagtagcgggataagtaaattcggtttgttttgatagacaacatcatcaatcactttcccgcctagtaacggataaataatgctaataccagaagcaataaaaattaaaataaatacaccaaccataagtaaacgatatttccggacatattgccaaatccatttcatactctccattttttcacatcctttaacattcatatatccatttagtttacactcctaatttcgaaaaagaatggtttatattcgctggaagcatggacaatgttatataattaaaagataattgtaagcgttatatttaggaggtgaaacgatgctgaaaataaacacaaccacatttaacccgcaaattttgtatatagctaattgctataccaacgaagtacgagtgggcgaaaatcatcatcatgactttttagaaatctccattatttgtgagggaaacgttatttatgatattgaaggggagcgagtcgcattagaaaaaggggatatgttgatttttaatcctggtgtaaatcattacgatataaccgaacctggtatgacaaatgcgcaacttcacattggttttcggaattttgcactggaaggatactcgcgaaacactttcccatttaaaaaagcctttttacggaaaaaagaagatgaatctgctattttatccatttctaaacaaattatagaagaaaaagatgctgaaaaacctggatatgacttgattttaaaagcttttgttatgcagctaattatccatgttttgcgggaagctacgcccgaacaacttgaaaataatggcgtgaaattatccaccgatgagcagcaaaaacaaatgctcgtcaatgaaattattcattatatggaaaaacaccacacagaagatgtctcgctttcgacactctcgcaaacaatgtacatcagtcccgcctatatttccaaagtttttaaagaagaaactggcgagtcgccaattaattatctaatcaaaatccgcctgacacgtgcggaagagctactgaaaaataaagatgtaactgtgaagcaagctgctaacatggtcggctacaacgatgcctattatttcagtaaacttttcaaaaaatattatggcttcccaccatcggaaaactggcgtaaatcaagttaatttaaaatactgaatgataaaagcggtattttgaaggaaaattagcaggtgtttttcgaaatgcctgctttttattggattaaattttgcgattagtactaaaaatgtattagaatagaaaagagaaatgggaagggtgatgggacacaatgaaatttcaactttatattcaaccaaagttagatattcttcaaggtaacattgtcgaatacgaaatacttttacgcgacgatagtgaagttcctagatttcctttgtcggagttagaagctgtacttgcggacgaagaattataccttacattttgtgagtggtttagtgacgctttctttgatgttctaaaaaaatatccaaatgatcgctttgcaataaatatagcgccgcaacaacttttttacatggaaacgctccatatgttagacaaactaagaagtgagagtcatcgtattactatagaaatgaccgaagatatttttgatgttcccgctcataagcgacatttaaatgctgatgataaagatgcttttattttaaacaaaattaaaataattcacggcctaggttaccatgttgcagtagatgacgtagggtgtggactcaatagtttagagcgcgtactgagttatctcccttacataatcgagctcaagttctctttgattcattttaataatattgatttagaggatttacttttattcattaaagcttgggcgaattttgcgcataaaaataacctcgattttgtggtcgagggcattgaaacaaaagaaaccatggcaatcttagaaagccatggcgtctccattttccaaggttatttagttaataaaccatttcctgtttgaaaactatctatttgatcaaggagtttttcgtgtgagctaatagtaatcggttttttggatgctagcagcccatttacgagtaattcttctaatgattcagtgattcgagcgcgactagaacggcaataatcagctaaaaatgtttgtgtgatataggaaggtaaaacgatcgggccttctgtttgatggagattcagtagttcaataatttccacaaaaatacgagtcactttgattattggtggttgattaatatttttataatttttggcagtaaataaatatctaactattacatcatcaagtaccagatggaagaaatgtgggtttgcatacaggtaattaaggaaaaactcacgatcaatgaacagcgcccgcccgttttctagtgcgcgaacacggtattcagtaagctctggagccgtttttgtttcgagtaaactttccattccaaaaattgcgttctcagaaataagtgcatttatcatccagcgtccttcattagtaggtccctctaaaacagcagtaccttccaaaatcacgcctatttgaggtggttttttttcgtaatctttaaacgaatgaataatatctccttttttaaaagacaccttgctagagtaatcgctcgaaaaaatatcagaaaaatcggtagtgtgaagcatggttaaaactcctatacgaatgaaatttttatctaccatttaactgtacttctattcctatgaaaaagaaactaaatcaaagctgctgtcacaatttagacaaaaaaaagacactcattcgctacatttgcgcaaaaatatataataaaaagactctagtgatagagtcttcattaaaatttcttataaacatcaatagagttgccaaaattgattaaataatcgccgcaatcatacattggaccatatttttccgcataatgagaaacggtacggcgcaaaaattcctcggtcacttctaaaaattcagcaacctcgaaatactcttttaaaccaagataaaaacaagtaatgatgtcttccagtggaattaattcttcgtaacccttgcgacgagcaaaaagttcttgttttttatctgaaaggctttcttgttttgtaatatttcctaccgtgtacttataatgcatcaattcttccactaaaatgcaacctttttcaatagaagatttatctttacttataaaaatcattccattcaaatataagccaggtaatttgtaaggcattttttcttctctaattgttacctcatcttggtatttgtttaccaatttttcgtacaataaaatcacatcccgcgatggagttttttcttcatctctatataagctaaaatatctcgcatttcttcctctgtaacatcgtcatcaatatgggccgcaatcgtcaccgagcgttcgtcaacaggtggtaaatttctttcaggaaaaaagtcatctaatcgcttgttgaagatttttgcaagttcaaataaaacatcttgatttgctttacggtcgccattttcgtaacgactaatagtttggcgcgtcgtatgaagcttttctgctagtgcttcttgatttaggcctcgttcctcgcgatattgttttattttatttcctacaaatttatttaactccataataattgtcctccacatgtttatggctccagtatagcatttttagcaccaaaatggaactttttcgaacatatttgtcggataaagtttacctgtaaccaaaatggtgctataatatgtttagagctagaaaataaatgaggttgatttttgcaccaaaagcaccgttttggtgacaaagactaacttacaaatttatgagatggaagtgggaatggatggatagaaaacttttaaaagaaaagcaaatccaactaatttttcaactggaacaagaagaaaatagatttattcggaaacgtttaatagaagagttggagtattttgaagcactaggggatagagaaaaaggacttttaacggcggaacaaaaactacttattttaacaccaaatgaataccgcgaacataaaaaaacaaagtcagatgtagaaatcagcaaatttattggagtatcaaggtcctcacttgccgaatggaaacgaaaaaacggcttgaatagaaaaaagcaacgaccagttcagcaggagatgattgatgtattggcttttcatttggataagacgaaagaagagattggctctttaccggcttctgccattgagtgccagtatgaagcattcgtgattaatgaagcacacaattaaggagtgatcaaatgcaagttttagttttaccagaaaataaagatattaattatataaaaactgtccaagaagtgaaacgattttttgcagactttcagcgtttccgcgtgattacgggattatcccaaaagccatttatagaaagtaatggtttactagagacgccacattttggatcggtggcattttctgcaaggcataacatagaattaataaaggaagcgcgtttgttagtacaaagatatacagaaatgttaaatcaaatggatgatttatatcgaaaaattttaatagagtgttatgtggaaaaagagaaagatatagcagtaatgatgagtctgccttatgaaatagctcagtttaaacgtataaaaagacgagcagttctagaacttgcaacaataatggggattttagtaaggaaatgatgatacttttttgatattttacagtagcattttaccgttaatataaaagtaagccaattgtccagcaagcggatgacaataaaagctgcgtcagaatgaaggtgcaccgattttctgatatacatgaggttttaaaagaaatttgtttttattattgggttttaaatccgttgagataaacaaatattctatttttggaaagtaaagtttggaggaataaattattaaaaatggtcttgaccgaattttactttctatttttaaaggagtgagcgcttggtgaagagtttgagcttcgtgagagttttggaagcagtgagaacaatgcttcaggaaaaaggcggactagatgtttctattgtaatgcatgaccaagtggaattgccttcaacgatgatggagatgattgatcaagaggaagaagagagccgcacttcctggaaagaaaaataccgctttgccgttcatcattatacaaatgaactggatttagcgggtgtcgaacagattgataattttatccaagcgggttttaatttgcctgaaggatacaaattaatcgcagttcgtcatttcggaaaacaaaatttagttaaagaaaatacgttgattcatgcaaaaactagttttgaagtaagtatttgtcgtgaattaaaagtaaaaatttaggaggaattattaatggcatttgaagaaaatttatattgtgattatacaccgggagctgctaaagcggtcgcggggaaagacgtaatcttagcaatttttaacgcagcaggagataaattattagcggttgcaggacaacagggtctaactgttaaccgttcaaaagatagtattgaaatcacatctaaagatacagtaggtggatggaagtctaaaatcggcggtatgaaagaatggtctattgaaaatgatggtttatacgttgctgatgcggattctcataaagaattggcgaaatatttcgaaagtgatagtccggtctgtgtgaaagttattaaccaagcatctaaaaaaggtctttttggcggcttagcaattgtagcagactacagttttgaggctccttttgatgaagcgatgacttattctgtaaaactagacggaatgggagcgcttgttgatttaactattactgagggcggagatcaaatgcccggcgaaacaccagcagcaccagcagaataaaatagaaagccactgaaataagtggctttcccttaggaggaaaataaatgtttgaagtgaatgatactaattatattttacgattcaataaacaaaaagtgaaaacggtggaactaacgtcaggaattagtctagtagcggctttgactgcaaataaaggaattttgagttaccaagtgattgaaactctttttgcttctggactagtggaagaaaaaggtttagtgccagtaaaacaaaaagaagctttggagatttttgataagttagtggaagaacagggcttaatttcgcttaatgtagcagttattgagaaattacaagaggacatgggttttttgttccgttaaagcagattgagtttgaatattttggcgcagagaacgaagaatctgatagtgaaagcaaccatgattttgacctcgaaaaacaattcgcgtttttcgttgttaattttcaaatgtcaaaacatgattttgaagcattaacagaagttgagaaaaatttcatcatgaaagaatgggaaaacaaggtcatttttgagtctactatgcttcgaaatgccgtcttgaatgctgaacaaaatctcaatcgcaaacgaaattcgcgttttattgatttgcataagaagcgccagaagaaagcagatgttaattatacagtaaatgcacttcaagcaatttctgagaatgaagcgcttgaaggtaaagcgtggattgaccggatttacggtgcaaatggcctacgcagacctaaaaataaacaagaaagggggaaaacgaatggcggattctaaaaaaattacatttgaaatgaacgagagtgtcttaacagctcaatttagtaggttagatgaaatggcaagcgttgtagagcgacgattttcagaattaaaaatgacgattgaagatgttggaaatgccgatccaggttcgaaaattaccgagtctttgggcggattgcaatctggtctcggcactattagttcagcgtttgggcaattaggttctagtagcgaggcaattacatcaggatttggaacagcggttggttctgttggcggaattacggatgcttttaaaaacctaggttcaagtgtccagaatggtacgttattttcaagcttgtccactggaataggtggtatgagtacaatgcttggtggagtaactggtggagttcaaggaattacgaatctagctagtggttttatggaattgaagaatcacttgggcggcttaatgtcttctattggcggtgtcggaggaattatgggcaaactgacttctccaatggggttagttattatcgggattgtagcgttagtcgctgcatttacgtacttgatgacgacgaatgaatcattccgaaatactgttatgtcagttgtcacgcaggtagctcagttgtttggtcagctagtggctagtctgatgccgattatcatgcaaattatcacagcagtcatgcaaattggtgcggctttaatgccgatagttatgcaatttattagctttttcgctcaattgttagctcaattaatgccatttatcaatatgcttattgcaatgctaatgcctgtaattatgcagattgttcaagttgttatgtcgctagtttcggcgcttttacctagtattatgacggttattcaaggcattatgagcgttatccaattcttgattcctataattatgaagatcgccacggtcgttgtgcaaattgttgtaacaattatttcttatataagtaaaattatgccgattgtcatgatgattataggtgttattatttcgattattactacgattattagttatattgttgttattgcaacgacaatttcaaatgttattgggaaaattataagctttattgcaagtgttattacgtcgattatcgggattgtgcagccgattattggtttcattaccaatattttcagctctatcgttacagttatcggagcagccttccaaatggtgtttgcagttgcatcaaaaatttggaatgcaataatggcaacaatttcaggtattattgatggaataaaatcagttattacagggatttctacgacagtttcttccgtgttcaatggagtcaaacgaattatcaccggtgtttttgatggtattaaaggcgcttggggtggtttaacagaatttgttgggactattttcgatggggtttcaaatgcaattcagacagttgtagataatgtcaaaggatttgtgaacgtggtaattcgagggattaattcagcgattagtttaattaataaaatccctggtgttgaaattggtaaaatcccgcaattaatttcaggtactacaaatttccaaggcggttttgcacgaatgaatgaaggcggtcgcggtgaaatggtggtgttaccgtccggatctcaagtaatcccgcacgatgcaacgatgaaatatgcaagagaaagtgcgcgtggtaataaatcaatgctttatacaaatcaagggactgatttagctagggtagaaaaccttctagaacgcttactacaaaaaaatccagttattaaaatggacgataaagttgtatctgaggtagttagtcgtaaccaggcaaactcgtttgatcaatacaattatacaatgggaggtgcggcttattcatgagtgacttatttttagaactaaatggaaaaattcattcgcttagtgaaacatttccgggactttccgttcaagaagtagcgaggcaaagtccgcaattgagtatggaaactgctgagatttctggaacggacggagttattccaggtactatccaatttaaaccttttattttttcagcaaaatgcaatttacaggcacttgatataccggattatcatttagcagttagagaaatttatgagttcttatttcagcgagatagttactatatttggagtgatcaaatgccgggaattcggtatgaagtgcatccaaaaccatttgattttagtcgtgaatcagatcgggttgggcttctcaatttagagtttgatgtttttaagggctatgcggaatctcgtggtacaagtctggacccaatgacttttgaagtggacttatggcaaatgggcatgaatttatctaaccgagatgatttgttttatgtttttaaagagaatacatttcgcgtttataatgcaggaagcgaccgagttaatccgttgatgcgacatgagttagacatagctatgacagcaaatggaatcccgactattaataatttaacaaccggtgattcatttcaatatcgtaatgaactcaaaaagactgatgttttgctgttaaataatatctatccgcttgtaaataatcgtcgcgttggaaaagacacaaaccacggcattattacccttgaaaagggatggaatgaatttgaaattaaaggtgtaacggatgtaactattgcttttaattttccgttcatttatcggtaggtgataactatggactatttgatcattcaaagtatggatagagaagtagaagagattttaacagatattgattatggctctttttcttatgactatgaaaaaaacacgagtcgttccatctcgtttacagttaataaaacaaaacaaaatgctgatgtattcaatctggttggaaatgaggcaattctaacctatcaaggtcaacaatttgtcataaaaaaatgtactcctaaggccgttggaaaaacgatttctaaacaaataactgcccagcatataagttatacagtgcaagatcatgttcagtataacgtgaaaacgggacgaaaaaaatattcgattcagacggtaatggaatttgcgctaaaagacaatgagctaggattttctcatgaaatacaaggtagttttccattagcggagttagaagatttaggaaataaaaatggattagaattagtgaatttatgtttggaagaatttggagcaatactatttgcggataataagaaactttatttttatgatgaagcgagttggtatttgaaaacagagaagcaattacgctatttatacaatacagaagatgtttcagtggatacaaatactgataatttaaaaacagagataaaatgttatggcaaacaaaaagaaaatgccgacaagctaacgggtgataataaatatatggcggttgttacttatacttcgcccaacgtatctatttatggaaaacgaatggctaattcaaaaaccgacgataaaattacgaataataacgacttattgatttttgccaaaaaacagattctggatgttccggaaacctctttaacgattacttatagaggagatgaagcagttacagaacgagatatttggtactttattcatgaaccaatgggatttgaaacggaagtgaaggttacgagaattaaatcagctcatccgtggagtaagaaatttcaagaaatcggttttagtaattcgcggcgtgatatggtacgaattcagactcaaattgcaaatcaagtgaaaaaggctagcgtagatacaaataagattaattcgttttcaagcatcgcaatgaatgcatatgattcgcggattttaacggaagtagtaggtgttgtagatggcgactgaaattagagttttaaaaaatgtggatgaaacagttttctatccgaaaacacatgtaactgctgtcgagggtctgaatgaagtttcaacaaacgcttctggattaatgactccaactgataaagtcaaattaaatggaattgaagcaaatgcagaaaaaaataatgtgactgcaagcgatatttcaaattggaataaaaaacaagatgcgattttagtttcggaaaatggttctaatttcaaaataacagtgacgaatacaggcgaactaaagacaacgaaattggaataggaaggaggttgcatatgaagttagatttgtggaaatgggaaatgcttcttcaaggtcgtgaatttagaaataaaaccaatgacaattggcagaaactaatggattggtctaactttatttctacgggaatagatacgatttatacctacgtaaacaaagcagatgctaccttaaatgccaaaattgaaacagttgataaagcagtgaatgcaagagttaacgagttgattagtgggacagaacagctaagtgaagttgttgatgccagagcagatgcatttggcactaggtatccggttttaagagaacgtctaaaccaagaacagcaaatttttaacaagaaaagcacggcacattttgatgtggataatgttataggtatggataaacaagatattggtttgttgaccagtaaatcaattactgaagcgcaaacagtttgttttttaaatatatcaagcttcaatgagaatgcggatattgttcttgaaaagactagtgaaacgagcttttcagaaagtttaacaagtttagtttttgcaaaattagggacgaatgaacgttaccaaatggagtcaactggtgcgtaaaggaggagtgaagaatgactgaaattaaacgaatgctacaaacaaaagacgataattctaaagaacaattttatccagagacacatgtggcgggaattgttggacttacagaatatgtttctggtcagattccgactggtgtcgttagtgtcaatggaaaggcaggcagagtattactagaagcagaagaccttcatgctgctaagaaaatccatgaacatgaagtcgcaacgtacacaacagatggatttatgagttcttttgataaacaaaaaatagatcaattagtatctccggaagcaggcgtaacaagtgtaaacggtaaaacaggaattgtcgacttatttgcagctgatgtagaggcggcggaaataaaccatactcatccggaagcatcagcaagtgaaagtggctttttatcaaaagaagataaagaaaaactagatgcgatgccagtaatcgcactggaaactattaaggaggttatagaatgactaaaattgtaaaaatgtcagagaaaaatgaacatggaacgttggagcaattctatccagaaacacacgccgaggctgttaaagggcttgtgagtgttacagaggaagaaaagacgacttggaacgagaaagaaactactgcgggtgcggaacaaaaggcgaatacagctttgaatagtgcgaaagaatatgtagatacgattgggaaaggaacagtgatttttaagggagcaaatattatgggtgcgggtcaaaaatatacatggagttcttccaaactgaaatttggaatcactttactattcagtcgttatgattcagcaaataatactcctttagattattattatcactcagttttcttgtcgaaagctcaattagccgaattagcaggtaaaggtttgttagttcctatgccatcagcgatttacggggaaagaaagtatttatatgtttctgaaacagaagtcgctggacacaatgataatactaataatgcttcttgggcattacgccagctaactgtaatgtaactaaaaaggaggttttccatggaaatcatactaaaaattgggattttaggttttggcgcggtatttggatacttgtttggggaagtggatttattggtaaaagtgctggtgtgctttattgtagctgactatatttctgggctactcgcttcagggtatctgggggaacttagcagcaaaatgggtttcaagggaatcgcgaaaaaaattgctatcttgattttagtggctattgcgcatcaaatagatttgattctgggaacgcataatacgacgcgggatgcggttatctttttctatttggcgaatgagctgatttctatattggaaaatttcgttcgaatgggaatgaaggtcccggaagtattgaaaaatttaattttgattttcgatgcgaaatcaggggacgaggaggaaaagcatgacaaagatatggattgatgccggtcatggcggcaaggattcaggggcgactggtaacggacttgttgaaaaaaattgggtactatcagttgcgaatcagcttcaatcagaattagtaaaagctggttttgaagtaggtatgactcgaacaaatgatacattttatgaattaagtgaccgagctaagaaagcaaatagttttaaggccgacttatttatttcgattcattttaatgctggtggtggcaaaggctttgaagattacatttatacatcaacaccagctgggacagtagaatcacagaaaataattcacaaaaatattatcgctaaaattaccaaacatggtatgcgtgatcgtggaatgaaacgagctaattttgctgtgctgcgagaaacggcaatggatgcaattttgctggaggcaggtttttgtgacagcagtgatgcaactatacttgcaaaaaaagcatatcaaacggatttttgtgcaggaattatctcaggagtacaagagctttttggtactcccgtaacgaaatatcgagcagggaaatatttgacaagtaatgatgctatttcaggcaaaaatattaaaggttatttagaagccgggacaaaagtttttgtttataaagaaacagcaaaaacactcaacctaactactacaaaaggagttccgggaagctgggttctaaaaacggaagtaaatacgggtaaaagataaaaaaaggagcgactgataggtcgctccttttttattaacttctcttacgcaaagtataaagcgcggtagctgttaaaataactccaaacacagttgcaagtccagctgtgtcaccagttgttggtagggaagtgttggaagatgtccctgagttagatgtatttggtgtggaggttgttgggtcttcggtagttgtagttccgccagtatttccggagccattaccgttatctgtaccactatttccatcagttccgccgttatttccgttgccattgtccgttccgccattaccgtttccattatctggaggggtagttgaagttgcttcttgaacagttgcttggaaagttgtgctgtagccgtttatgtcagtgattgttgttgttacttggtcgccttttttaaggtttaaagaagtaacatctacggagaacttaccgtttgcatcagctgttgcgttaggtccggcagcaagcgccattcttgcattagcagttgctttttgaacagagacagtagcacctggtaaagtagttccagttagatttttgtctttttcagctaatttattgatttttgttgcgtctttgattgctttgatagctgcatcttcagtttctttgtcgatttcagcttgggatttgtagactttacgtccttctttttgagctgtaatgacttttccggcagctttttggtctttaatgtagttgatgaatgtttctgtatctggatcgattgcagttactagatttgcttttttgaaggctgagaatccatcgccaccgccaaataggaagtcattgattacgactttatatttttggtcggcttttaaaggagtgccgtcttctgttgtaacgctcgcaactttgtaagcatggtctagatcatctgtatctgtgaaagtatattttaatccagaaatttgtaggaaataagtttggttgcttaaatattgttggtttagagcttccaaaatatcagcgcccgtcatttcgactacttgaagaatgttaccaaatggttgaacagcttgtgccgcgccccatgtgatttcgttttgaccatttgcaagacgagtagtaagatcagaacggattccgccgttgttagtcatagcaaagtcgacatcggcgccggctttgtttgccatgtaacgttgcgcatccgtaatcatgttaccaagctcagattctttatcatcaattgctttgttgtctggatttgtgtcacgagaaataacgtctttgtttgctagtccgatagtttcgttaataacaccttcaatgcggcttttcgcatcttcggttactgcggtaatatcggcatttggtgtgacgcttctcgagttatatgtaattttagcgtcaggtggtgaaacgaaatcgccagttgttttatcaagttcgccagttacatctgaaaaagctttaccattgttgtaactttggacgatacgagtttttccaactaatccgtttgtgtattggtgattgtgccctgcaaggactaaatcgaccgagttgtttgggtctaattggtttgctttggtcatcatattcgcagcttccccggctacatcttgttttgttccagtgtttgggttcccagtggaaagtgctggaacgtgggatagaacaacgattgcgttaacgccttggcctctaagttcagcagagtatttaacgattgtttctgcttcatcaaggaaatcgtagtctttaatatgatttgcaagaactaaattaggaatttctgttgtaacgataccgatgaagccaactttgacaccatcaatttcttttacatagtatggtaaaaagccttctgcgactgtgtttgttcctttgttgaccacgttagctgcgacgattttcatgtcacttttaacgcgtggataagcttctacgattggtccgaatttgtttgtagaaactccgtccaaaattcgtttgtattcaggtaatccttcatcaaactcatggttacctaatgtgccgacttcgaaattcattttttggagaactttcattgttggctcgtcttgaagtaaacctgatactgctgggcttgcgccgaccatgtcgcccgcttggacacgaatggcattgtcagttgtagttccaggattagcttgtaaaaatgagctagtagcgttgtccaagttagtagctaagtaatccgcgccgccaattggtgagcccgatgcatctttagaggctgtttcaagcgctccgtggaaatcatttattcccaaaatttgaatgggaacggtatctgctgctgcttgtgctgttgtcccggtgaatggtacagtaagtccgattgtgagccctgctacgagtaaaacatgtgtggttttcttgaaaaatttgttcactttcacactctcccttttttcgccagtggcaattttgtaagcgctaactcaaaggtgcctagctataattgtagcaaagaggaatcaccctagcaataggaaatgtggattttgtgtaaatgtaacgataatttttggctatattttcatttcggttgaaaaaagggtaaactatagataaaggagggataagatggatatctctagtacggaaatttgggatgcgattagaagaaatagtttcttactgtattatcaaccaaaagtagatgccaaaacgaatgagcttatcggatttgaaggtttaattcgactaaaaacagcgacggcgattctagctccagcggatttctttgaagatattgcccttttaaatgctacgcgagaaatgcaggattttgtggctgaaacagcaattgaacaaattaatcagctagggggacgtttttcgatttcgattaatattccggcacattatgttgtaagtagtaattatatgacttttttatatgattatgtgaaagaacatttaaagtatccggagtgcttagaaatagaaattatcgaacggggcgaaattacggagctagctgttgcagataaaaacttacgtaaaattaaaaaactcggcgtcacagtgagcatggatgattttggaaaaggctacagctcgctggcatatttgcgcagtttaccaattgatattgtaaaaacggatatgtcatttattgctcttttaaaaacggatcgaaagcaacaaattattattcaagcaattgttaatttatgtcatgatttaggtgggaaagtcgttacagaaggcgtagaagacatcgaacaagtgaagacactgcgcgaaatgaaagtggattatttccaaggctattattttagtcgaccactaccaatgaaagaaattaaagaaaaatattcgattgtctgagatgcctaaatgaaaaaattggttggtgtgagaatggtaatttaccaaattcacaccaaccaattttgtttttatttgattaaattgtttgaagcatcttttacaacaacgtcatgcgcgccgccttctacgatagaagtagaagaaacaagcgtgatttttgctttttgttgtaattcagggatatttagcgcgccgcagttacacatagtagagcggactttgctaaggctgatagcaacattgtctttcaaggaaccagcgtaaggaacataagaatctacgccttcttcaaaagataatttcttgtcgccgccaaggtcataacgttgccagttacgcgcgcggttagctccttcgccccaatattctttcatatatgtgccatttaaattcactttgttagtaggactttcatcaaaacgagagaaataacgaccaagcatgataaagtcagcgcccattgctagagctagcgtcatatggtaatcataaacaatgccgccatcggaacaaatcggaatatatacacctgtttcttcaaaatattcatcgcgagctttagcaacatcaattagggcggttgcttgtccgcggccgatacctttttgttcacgtgtgatacagatggagccaccaccaacgccaactttaacgaaatctgcgccagcttctgcaagataacggaagccatctcggtcaacaacattccctgcgccgactttgactgtatcgccgtatttaccgcgaacatagtcaagtgtgcgtttttgccattcggagtaaccttcagaggaatcgatacacaaaatatctgcgccagcttctactagagcgggaacacgttcttcatagtcgcgtgtgttaattccagctccaactacataacgtttggaggaatcaagtaattctaatttattttctttatttgagtcgtagtctttgcggaacaccatgtgaaccaagtgttcgttatcgtctacaagtggcagggcatttaatttgtggtcccaaataatgttgttagcttcttttaaagtggtcgattttttagcagtaactagtttttcaaaaggcgtcatgaaatctgctactttttcatcaggactcatacgcgtcactcggtagtcgcgacttgtcacgattccaagtaatttaccgtgcgctgtgccgtcttctgtaactgcaactgtagaatgaccagttttttcttttaaatcaagaatgtcttggagggttttatctgggctgatattagaatcgctaatgacgaaaccagccttatgatttttcacgcgagaaaccattgcagcttcactttcgattgattgagatccgaaaacgaaggatacgccgccttctttagcgagagcgattcccatgttatcatcagaaacagcttgcataattgcggaaacaagcggaatgttcattgtgatagcagattcttccccttttttaaattttacaatcggtgtttttaagctaacgtttgttggtacacattcagcggacgagtagcctggaactagtaaaaactcactaaatgtgcgggacggttcttcaaaataaaatgccattatttccactccttcttctattgttaaatatacttataaaatatctttattatttcaataactggcttgaaagtcaatgactgggatgctttttcgggacgttttcttttagtagatgagtggaatatactaagagtaaggaaactttggcgaaggaggtaatcagatggaagaagaaacattattagaacaaggctaccgtaagtatcgcggggcagatgtagatatttattttaatacgaatatttgtgcacattccggtaattgtgtaaaaggtaacgcagaactttttaatttggatagaaaaccatggattatgccagataacgtaccaaaagaagaggcaaaacgggtgattcatacttgcccaagtggagcacttcagtatatagagaaataggaggataacaaatggaatataaaaacggtgaaaatagaatttatgcggtaaatgatgaaggtgtcgaggttggtgaagtgacttttgtgccaactggggaagatatgtttattattgaccacacaggcgttgatgatgcggctcgaggtcaggggatagcgcaagaacttgtaaaacgtgcggtcgaaaaagcgaaaacagaaggaaagaaaattgttccgctttgtccgtttgcgaaagcagaatttgctaagaagccggaatatcaagaagtacaagctgcaaaataagaagcgtagactaggttttatgcctagtctatttttatgaaaaaaatttagaattccagttttctcttcttgacatctggttcttttcagtgtatctttaattcacagtaaacttataggaataatagtattacaatttcttatccagagtggtggagggaatcggcccagtgaaacccggcagcggagcgcaagttctatgctaattccgatcagaagtaatattctggcagataagtagtagcttttaatgaggcgcttcgattctgaccaaaaaacagaggaagcgttatttttagcgcttaaagaggggagtttttgttagatgaagaaatttttattagtagcggttatctcggtttttgccttggtgttaacggcttgcggaggctctggcgctagttcagacaaagcaaacggttcaggcaaagcgaaagacggcggctctctaattatcggtgttactggagatccagaagttatcaatccgaactacgcttctgatcgtgtaacattaacgattcaacaagctgtatacgcaccgctattttgggaagttgacgggaaaccggcacttgcaaaaagcttagatatttcagacgacaacttaacttacactgtgaaactaaaagatggtttaacttggcatgacggcaaacctttgactgcagatgacgtagtatttactgtaaattctattttagatacaaaacaaaacagcccgaaccgcggcaactttgtttttgatgataaacctgtaaaagtagaagcagtggacgatacaacggtgaaattcactttaccaactgttgctccagcctttgaaaatacaattaaaacattcttcccaattccaaaacacatttttgaaggggtagaaaacatcgagaaaagtgataaaaacaaaaatccaatcggctcaggtccgtacaagtttgttgaatacaaaacaggcgaatatgtttccctagaacgattcaacgactattttgacggcaaaccaaaattggataaagttactttccgaatcacaaaagatcaaaacgcagctaatttagccttacaaaatggcgaaatcaacttaaaatcgattcaaccttctgatagaaaaaaagtagaaaaagcgagcgcggtaaacattatcacttacccggaaaatcgcttaagctatgcaacattcaacgaaaaccaaccagcacttaaatcaaaagaacttcgccaagccctttcgtatgcgcttgaccgtgaagaaatcattgatgcggcttacggttcagatgaatacgcaaaaccagcttcttcgttcctaacagaaaacacgaaatacttcacggataaagtagaaacatacgatcaagacattgccaaagcgaaaaaattagtaaaagaaagtggttttgatacaagccaaaaactaactgtttactatttaaacaacagtaaatcacaagaaagtatcgcgctttacttacaacaacaatacaaagaaatcggcgtgacacttgacttgaaaccaacagatccaaatgcactaagcaacatcacacttgaccgcaaaaacgcagactactctatcgcactaaatggttatatcatggggaacgatcctgatgcatataaatctctatacctaagcgatgcgccatacaactattcaaactaccacaacaaagacctagatgcgctttgggaaaaaggtgctgtaactgcggacgataaagaacgtcaagaaatctatgaaaaaatccaaaacaccattgctgacgatgctgtaatttatccaatttcttatgataatgcagtgctagctcttgatagccgttacggtggtcaaaaagctgcaacaccacaaccagtaacaatgttccgtgatctttctaaactatatttaacggaataataattaaaaatcattcgtaaaaaatctggcctgccatgcttgtttttggcaggttcaggtttttacttgtcatttttagtgttttagataggagataaattatgctaaaaacaatcataaaacgcgtattgcaaattattccgatgctgtttattatctcgattatttcgtttgcacttataaaattagcgcccggggatcccgtgaattcgtttgttacgcctgatatgaatcctgatgatgtggagcggattagacagagcttagggctggatcaaccgatttatgtacagtattttatttggcttggaaatttgctccaaggtaatcttggttattcgattgtaaacagccaaccagttttacaacaaattttagagagaattccggcgacacttggtttggtgggaacttcgctcgttctgacgttattgttgtcgattccacttggtttggttgcggcgaattatgaaaatacgtggattgataaagtgctaaacgggatttcttatattgggatttcgattccgattttttggtttgggatgattttaatagatgtgttctcgattcaattagggtggctcccaagtctagggatgcgaacgattggggtcgactccttctgggatatggcggaacatgcgattttgccagttataacgctgactttccaagggtgcgcggcatattatcgttacgtccgctcgaatacgattaaccaattaaaagaagaatatgttttattcggttatgcgaaagggttatccaaagtacaaattatggggcatcatgtcttgaaaaattccttgttgccagtcataacactacttgggatgtcacttccgcaagtcattacaggcgcttttattaccgaaagtattttctcgtggccgggaatggggtcgcttggaattaatgcgattttccaactagattatccagttattatggcaattacacttttttcagcgctattattaattattgggaacttgctggccgatttagcttatatgattgtcgatccacggattagggaaatggggtgaggaattcatgatgcgattagatttttcgaaaaaaacaatgcaagatttcgagcgggatgcggaagttgttcatgctaccagagagcggagtttttggcgttttatgctggctgaccgccgcgctgtttttgcgacgagtgtgctgattcttattacagtcgcttgtattttcgcgttcctttcgccttatgaccccaatgctctttccgttcaggacaaactgatgccgccaaattcctcgcattggtttgggacggatgaccatggtcgggattacttgacgcgtgtcttgtacggcggccgggtttcactacttgttggcgtgtttgcgatgatgattgccgttgtcgttggaacactcgctggtaccgttagtggctactttggtggattcattgacaatatggtaatgcgttttcttgatattttcatgtcgattccatcatttttcctactaatgattttaaatgcgtacttaaaaccgggaatttcgaatattattatcattatcggattgctttcttggatggaagtggcgcggatagtccgagcagaaactctgacgctaaaagaacgtgaattcattttgtactccaagtcttcgggtggcggatttttccacattatgttcaagcatattattccaaacgcgatgccatccatcgtcgttgcagcttcattaaacgtcgctacagccattttaaccgagtcagcactaagtttccttggcctcggtgttcaacagcctaacgcttcgtggggcagcatgctgaacaatgcgcaaggctacgtcggcgaagcaacttacttggcacttttccctggattattaattttaatgacgattctttcatttaacgtgcttggcgatgtgctgagaaaagggttatcacgtagatattaaatgtaaaaacactttgattttttcagtcaaagtgtttttttgttttttaaagaaaaggtacttaaaatagaaacgtaaaaaacgtgtttaaagtcttttttaagagatcaattcacaaaattttcacaaaagtcgttcgcgaacactgttataattaaaaggataggaattccttaacatagacagagatgaggctgagaaatgagtgaagtaaaagtcagagaagcaacattaaaaaaacacgcgacgaagctagaatctaaagcaaaaacaattgaatatttacccatgaaaggcgggaatatggcatatagtcgagccaattctatcaatcattttcgaaccgcgctgtttgacttagtggaggcggtgggcgattttcaaaatgtggtaggaacggatgccaaaagattgaaagaattaggcgcatcatttactcgcaaagaccaagagcttgaacgaggcatgggattgggaggtaaataaatggatgcaaagagccaacaaatggagacacaactacaattgctgaaaaaagaacaatccgcggccgaagattttttgcaagatttacaacgacaacaaaatgaacaagagtggttagcggaagattttgcacgtgtccatcaagaagaacgggagtcgctggagcttctgcgcgaagtttggcaaggcgcagaatcaagaagtttcggctactatttggcggatttacaggaagaagaaaaacagaagtggcataaaaaaatccaagcgaaccaagaagaacaccaacaaaaaatcaccgcttgcaaaaaaaacatctaccaattagaaaatcaacaacaagatttacaaaaggagttgttacagtgagccgaattgacatcggagaaatacaaacctttgcgcaccaactacatacagctaatgaagccggaagaaaaagcattaaagacatcaaaaaagccgtgaaaaactataccgaagacggcagtttaaaaggaaaagcgatcgatgcatcgaaaaattattaccaaatgacctatttcccattatgcgatgcgataatcgaagccatgaacgaaagtgaagaacggttagctcaatatatagctgatttccacgcccaagtggatggttctgcggatgcgaaaattgatgcggacggtttatacgaactcgggaaaatgattgatcgtattgaagcgaaaaaagaggcactagcccagcggatgaataccggaacagaagggcaaatgcaaagttatcgctcccagctaagcatcgcctacaaacaggaaaatatcttagaaaaatacttggcttttgaacaaagtcatggtggtttttttgataatttaaccgatttagtccgaggaattcagcaaaccattcgcgaactccagtcgaacattcaatttaacagtaaaacgggtacctatgatatgagcaaactgaatttcaccaccgtgacccggatgcaaaacgccttaggaaaagcgctaaaaaacaacgaaaaaacattcaattttgacgaatatcaaaaaacgtaccgtggccaaatgtgggtgttaatgaaaaatggtatagtagacgtagaagcaacgaacgcgtacaatgccgctgtgcttaacggggaattaccacatgaaagcaatgaagcgcaggaagaagccgagttgctgcgggcagttattcaatcggtgaaagaaggaatagacccggttactggacaagagataagtaaagcacaaggatttggtattattagtggtcttattttccgctatactgctggaggttataaagggaagaagattaagattcctaagaatatattagataagataaagaaatcccataagtctaaatcaatcttgacatccgaaatggaagccaaaattttagagggacaacgtaaagggactacaaatggaattaatggtggacattcatccgatattaataacaataacccaaatttcgcaacggaaactgtagaagtaaatcaagatggcactaaagtaataaaattcactaaacaatttccagatggaaatatttcaaaaataaagacgagtacgatttttccggaggattggtcagataaagatattattgattctatactgaaaattagtaattctactgctatcggacaacgaaagattgatgggttaacacttcatagaggtaagattgatggggtggagattgatgtaattaaaaaaggtaatgaaataatttcaggataccctgttggaggcaagccaactccaggatttgagacaataaaatagatttagaaaggaacgtgtagaacttgtttggaaaattagatacctatttacttgattttatcaatgaaaattcatcggaagacttttggtatgattatgcttatttacaggcacaagaccttttaaacaattttactcaaagcgactgggcggaattgcaccaaaatattgatactaaaagtgatttatggaaaataagagtagcctattgtattgatgaagatacggggatgaatggctttgaatttcttcttagtttaatgaatgatagtgatgatgtcgttgaatatgcaatagactcactaagatcgtttgattcagaagaatataagaatatcatacattcaaatcgcatgttaaaaataaaaacgcaaaaactattagaaaatgctagccttccagtaaaaagagttttagaagattttttacaacaaaacaaataaaaatagaaggaaatcaatatttgatttctagttctgcccataaagtcttaataattgacgcagttagcgaagaaaatggagtggataaagagcttactcgattagaatgttcgcttgaagactttacttttttactgaggaatataaaagatgttctgagatatgaagagaagtagatggtgaactgccttgttattcgtcactattttgggatggacgctgaggaaattgatataactttatacaacaaaacccagcaatttttaaaattgctgggtttcttccaaactggcgaattacttctccacccgaataaacttataactataaggcgaaccaaaagcatgtttctgaacgcccgtaatatccgtacgttgcaacactgctgtttgatgttgataaagtggtaaaatcgccgcgtcatcatcaagcagaactttctcagaagctacgaacgcattccaacgttcttctggtttcgtcgcgagcgttgtgtctgttgattttacaagtttatcataagcgggactattgtagctcatatggttattaaagtaatcggataagaataaactgctatatgtccaagggtccttaaaatcaggcatccaagcagccagtgacaagtcgtaattaccgtcagaagttagctgtgtcgcgctcttcgaaggcatgtttttcactttaatcgtcacacctggtaaattatcttcaaactgcgctttcaaatatgcgaaaatggttttcgttgtttcttgatcatcgccgagcagttcgattgttactttatcagttccaagttctttttgtgcttgtttccaatattttaaagcttcttctttgttataaactaaatggtcgccgctatctgtgcggaaatcagcgcccgttgttggattttgaacgaaatcttttggaagaagtccgttcgctgggaatgagccgtcaccgagaatgcggtccgttagttgtttcttatcaacagctaaattaagcgcgtgacgtaaggaattgttcgcaagcggagtcgctttaccgtcacgtttttggttcatgcgcaagtaacttatcagcgcatctttttccgtttgaaaatctttcttgtctttgtattgtttggcgaaatcgcctgaaagtggcacgcggtcagcctcgtttgtattataaaggttcacaccagcgttaatatctttcgcgacttgcacattgatttcgtttactttgacattatctttgtcccaatattggtcgtttttcgcgtaagtccatttattcgtaatgttgccgccccaatccttcatgacaaaaggaccgttgtacaaagtgtgcgcactatctgttccgtatttgtcgccttgttttttcacatagctttctttttgtgggaaaaatgtttcaaaagaaagaagtgaaatgaagtatggaactggttttttaagtgtgatttcaagtgttgttgggtcagttgcaacgacaccaaggtcagttacaggtaatttgccttcattgatttcagtggcgtttttaatcgaatctttgaaaagcgcggaatatcctggtgcggtttttggatcaacggcacggcgccacgcatagacgaaatcatcggcggttacttgtgaaccatcggaccatttcgcgtttttctttaatttaatggtatatttcgtttggtcagcgctgatttctggcattccatcagcaaccccaggaacaaagttatctttttgatcaagtgtgtataatccctcgaagacttggttttgtgcggtgaagctagcaaagtcttcttcagctgtcgtatttaaagtcagtaattcactggtttcaagaaatttaattttgtccggggaagtttttgtcgcagatttatcattgtcatttccgcaagctgtaagtaaaagtactgtcaaaatggcaaaaataggcaatgttttctttaaaaaatgcatggttttctccccttctatctgtgtatttatcgttattataagtattccgataagataagtcaagttaatggtttcttgaaaaaactgcttgacgcaaaaaaaatcccatgataagatattttgtgcaaataagaatgattacgttttacgatgcgtaatcaaaatttacatagtatggctttaaggtttaaatcgtaatcattacgaaaaaggagaggtaatatgaagaaatggtcgtttttagttgtaacagtcttggcgttcgttttagttttggcaggatgtggcgcgagtgctgataaagcaagtggtgataagctcaaggtagtgacaacattttatccaatgtatgattttaccaaaaatgtagcgggagataatgcttcgattgatatgttaattgatgccggaactgaaccgcatgattacgagccgagtgccaaagatattgccaaaattgaggcagctgatgtttttatttataacagtgaagacatggaaacgtgggtaccaagcgtacttaaaagcctagattcgaaaaaattaacgataattgatgctagtaaaggaattaaactattagaaggtagcgaagaagaagagcacgaccatgaccacggcgaagaaggtcatcatcatgaacatgatccgcacgtatggttaagccctgtccttgctgaaaaagaagtgaaaaacatccagagcggtttaagcaaagcggataaagcgaatgcagatacatataaaaagaatgcagaaaaatatacggacaaattaaaaacactcgacaataaatttaaaacagcttttgaaggagcgaaacaacgcgatttcgtaacgcaacatgctgcattccaatatttagcaaacgaatatgatttgcatcaagtagcaatcgcgggtctttcacctgaccaagaacctagcccagcgcgtttagcagaattacaaaaatatgtaaaagaaaacaatatcagcacaatttattttgaagaagtagcatcgccaaaagtagcagaagcgcttgctaacgaaacaggtgcaaaattagaagtactaagcccaatcgaaggtattaccgataaagaacagaaaaaaggcatggattacatcgcttatatggaacaaaacttacaagccttgcaaaaaacaattaaataaggaagcgataaaaatgaaatatattgatatagccaatattggttttaaatacgaatctgagccagtacttgaaaatatttcatttcaagtcagcgcaggagaatttatcatactaacaggagaaaacggagcagctaaatcaacactgctccgtattattttggggattttacaacctgataaaggttctgtcactttctccaagaagaatacagacggcggacgacttttagtaggttatgtaccacaacaaatagcttcctttaacgctggatttcctagtacggtcctcgaattagtaaggtcaggtcgctttccaaatggtaagtggttcaaacggctgacggaaaaagatcatgcccatgtcgaaaaagcattaaaatctgttgaaatgtgggattatcgtcataaacgtatcggtgagctatctggaggtcaaaaacagcggatttgtttggcgcgaatgtttgcaactgatcctgatatattgattttagatgaaccgcaaaccgcaatggataaacaaagtaaaattcgtttttatgatttattaaaacatgaagcacaagtgcacggtaaggcgattttgatggtaacgcatgatagtgaagagatggaagattatgttgataagcatattcgcctcgttagaaaggaggatgtgtcatggaaatgtttctctatggatttatgcaaagagccttccaagcttcaatgattattgctattattgctcctcttttaggggttttcttaattatacgaagacagtcacttatggcggatacgctttcgcatgtgtcgcttgcgggagttgcttttgggctggttttaaatgtgaatccaagtgtgacaacgcttattgttgtagtaatcgcagcacttgggatagagtatttacgcggggtttatgcaacttactcggagttgtcgattgcaatccttatggccgggggacttgcggtggcattagtattgatgagtttggatcagggcggaattacaacaagtgtacagcaatatttatttggttccatcgtgaccatcagcaaagctcaagtacagcttttagtcattctagggattgctattgttgtattgtttctggtgtttaaacggtttatgtttgtacttacttttagtgaagatgttgcggttgcagaaggtgttcctgtacgcttgatttctcttttgtttagcgttgttacgggtattgcaattgcggttattatgccaatagctggggcgctactcgtatctgcacttatcattcttccagcagctattggtatgcggatttcaaaagggtttctcatgtgtgtagttagcgcaatattaattggtttaataggaatgttttcggggctagtatcttcttatcaattaggaaccccaccaggtgctaccattacgctgatgtttatcattcttttcataatagcaaccgttgtattaaaaatagcgcgaaagtaatttctatatatatgtttctccattttgaagcattaggtttagctctttattatgaattatccaggaattatcctgtttttcgatttgattagtcgttttcaaatattgtaaatctttataaaaacagctttttgaaaggttgctatacgaaagtaaatgacttgttttaattgcgggaggtaagataactgtatcatcctcagtaggaataccatgaagtcgagcaagattggaaaaagtaagcataagtttttcagaagccggactactcgccattaaacttttaaagtaaatatgggtagtctggtttttcatgatgaaaaattgaaaaccgaaattctcggggaacatagatagaaagtattctatatcaagttttgagtatctatataagaaacatttcgagagtgttttatatcgaaaacgattaatgctatggtctagtaacgtaaaataatttaaaaaagctccttcaccttgaatggaataaattttgggttgttctttcccatcgtttaaaaataaagccacataaccatcaataataaggtaaacatagttgtctaaatctgcgctgttgtttagtaaaatggcgttttttggaacttctattttttcaaagggtattcttccgtcatgagataggtgaatgaattcgtggtaattatacaatgacttaggcataatgattactccaatctttttttatgtctttacttttgtataaataattgtatcagaaacaaaaaactcgattgtatggagtaaagtagtatttcacgaataaatgtttctaaaatgtgaattatttaaatcatataatgctgataagcacaaaaaaatgttatttaattgatagtgttgactatttttggacttttgggagaaaaaattaaaattgatgcgaacgtaggttctgtgttataattctactggaaaatagaggaggattattgatgaaaaacgtacagatctcagtgaggcgcttagtagaatttgtcttaaaaagcggcagtattgatagccgaatgactagttcagatcgcgctttggaagggacgaaaattcatcaattactccaaaaagaagcaggagaaggatacgaagccgaggtatcattaaagcttgtacgagtaatagatgacatttcttttacacttgaaggccgagcggatggcgtcataaacggagaaatgatagatgagattaaaactaccgaggtagaaatggatgaaattactgaagactttcgcccgctgcactgggcccagctcatttgttatggattcatgttagcggagaagtctgatttagcagaagtcacgcttcaattaacgtactatcaagtagccgataaagaagtgaaacaattcactcgagtcatgagtcgtaaggaaatgagtacttttgtggacgatttgctttcaaaatatgctatttgggcaaaaatgtctgcagcttgggaaatgaagcgaaataaatctattcaagaattaactttcccatatgacagctatagacgtggtcaaagagagctagcaattgccgtttatcggacagtgatggatgatgaaaagctattttgtgaagcgcctacaggcattggaaaaacaatgtcgacgctatttcccagtgtaaaagcaatgggcgaggggaaggcagacaagcttttttattttacagcaaaaacaattacgagacaggttgccgaagatgctttagatgaaatgcgccgtaaaggactaggggcaagaagtgttacaatcacagcaaaagataaaatatgctttttagatgaacgaaaatgtgacccggagcactgccaatttgcgcgtggctattacgatcgcttgaatgaagcgttgttcgatatgctgcaaacagaagaaactataactcgatcggtcgtcgaagcatttgcccggaaatatactttatgtccgtttgagttatcgcttgatgtggcgcttttttgtgatgtaattgtgtgtgattataactatttatttgacccagtcgtttatttgaaacgtttttttgcggatggacctggcagatatacttttctagtggatgaagtgcataatttagtagaccgagctcgttcgatgttctcggcgacattaagtaaatcaatcatcatgcaagtaaaacgtgaattagacaaaaaaaccgataaaaaactactaaattcagtaacggcaatgaataaaataatgattgccctaaataagcaactagccgaagaaaataaaacgatctatgttaaaaaagaagccttgtccgattggaatgaagctgttttaaaatttagttatgtagcaaaagactggttgccaaaaaatacagaggcaaaagctcaagcagatgtactggagctttattttgaaagtttaaggtatttaaagattgctgagttatacgataagcgctatgtcactcaaattacgcggaatcggtccgatgtgctgataaaacaactatgcttagatccggcgtttttactatcagagaaattgaaattaggtgctagttcagtacttttttcggcgacgcttagaccgattgattactacacgaatttacttggtggaaataatgatacaagtcgtcttacttttgcgtctccgtttaaacagaataatatgcatttaatggtagcggattatattagtacaaagtatcaaaggcgtgaaaatagcttggaatcagtgattgatgcgctttatgcgatgctttccgggaaaaaaggcaattatttgtttttctttccatcattccaatatttagaaacggcatttgaattgtttagcgaaaaatatcccgaagtgcgagcgcaaaaacaacaatcttttatgaacgaagcagagcgcgaggaatttctagcagcttttgaaacggggcgtgaagaaacgttcgtcggtttttgtgtcttaggaggcgttttttctgaaggcgttgatcttcgaggggaacgcttaattggaacggcaatcgtaggcgtgggacttgcgcaaatgaacgttgaatctgatttaattaaagattattataatgaaacaatcgggcgcggatttgattatgcgtatcagattcccggtatgaacaaagtccttcaagcggtaggacgtgttattcgcggcgaaaaagatcaaggcgttgtcttactgatagaagaacgttttgcaacagaacggtataaagctttgtttccggctcattggaaccatgccaggacagtgaaaaatacgctgcaaatcgagcgagaagtaaacgaattttggcggaacaactgattttctagtagaatggatgtaatgagtcgatttaggaggaaattatgtataaaattattgcgatagacattgacgggacgcttttaaacgatgcgcacgaaattaccccagctgtacgcgaggcgattaaagctgcaaaacaaaaaggggtcaaagtagtgctttgtacagggcgcccacttgctggaattaaaaaaagcttgatagaactagatcttttagacattggtgattatgcgattacctttaatggagcagttatcctagaaacagcgacggaagaaccattagcagatattactttaaataaatcagaattagaggaaatttatgcattttgtcatgcgcaagatgttaatgtaacgtattttgacggaaaaaacatgtatgtaccaagtcgaaaaatcaccgaaattacatgtcaggatgctttgttgcttcaaacgccactctatcatttgcctgtagaagaagcacctgagtcaattcatgtctccaaagtgatgttattagatacgccagaaaaaatcacggatgttattaaaaacttaccagagacaattaaagagaacttttatgtagttcgaagtgttccttacaacctagaattcttgcaaaaaggcgtcaataaaggttctgcactggaacttctcgtgaacaaacttggcatttctcaaggggaagtaatgagtattggcgatcaagaaaacgatattacgatgatagaatatgcgggaatgggtgtagcaatgggaaatgcaacagagcatattaaagaaatcgccaattataccacaacaacaaataatgaagacggggtagcaaacgcaattcaaatgctcgttctcgaccgttaaaagaaaaacattccatgtgagtttttctttagaggtataaatattgacagcgctttatttaatgagcgaaaatagaagatacaaaactaacacaatgtggaagtttttttggtaaggttggcagaaaatcatttattcatggaagtttttctctcgaggctatcttgccaaaaaaacgttcctttgttattgttttaggaatagtttgacatttaaataaaaaggagtgaatgtgcttgaaaatcacaaaaattaaaacacacattttaccgattcagctaagtgctacttttaagacggcgcttagggaagttagtcatgtgaacgtggtacgagtttatattcattttgataacgggattataggtattggagaagctgctccaacgcatgtaataacaggggatacggaagtcagcattttgagtgcaataaatgatattttcggtccttttttaattaatcgcgaactagacgaagaacttacaattttagatgaaatgaaatctttattagtacataattcaagtccaaaagccgccattgatattgctttacatgatgcgctggcaaaagctcattcaaagccattatatgaattcctcggcggtggcttagcggggcttgaaacagattataccattagcattgggacgccagaaaaaatggttcgagatgcagaaaccaaagtagcagaaggatttcagtcccttaaagttaaattaggtcttgatccagttgaaatagaagtagcaaaaatcaggcaaatgaatgatgcgttaggcgggaagattccttttagaattgatgcaaaccaaggatggactgcggatgaagccattcaaatcctaaatgagtggcaagatattccaattgacttcatcgaacaaccagtaaaaagttgggattttaccggtatggcaaaagtgactgcgaacactagttttccaatcatggctgatgaaagtttatttggctttcacgatgctaaacgacttttagacgaaaaatgctgtaatttgcttaatattaaattgatgaaaagtgcaggaatcaaagaagcgcaagcgatacatgatttagcgggcagttataatgtggactgtatgattggtacgatgattgaaggatatgcaagtttatcagccgcagctcatttcgcggcagcttccaaacaagtgaagttttatgatttagatgtgccgtttatgtgggatttacatggtaaaaacatcgctgatattggtcttgaaattggccgtggacaagtgcttttaacagaagaagatgggattggcattccagcttattaaagaaagtagggataatatgaacaaattagttagtcaaagtaatgcatttctttggaggaaaaatgaaatgaacccggttttagccaatattttagaggctagaaaagaaactgacttggttcaaattaaccaagaagatgcgatgaaattatatgaggatagccttgttgactcagatttgctttataacgactttgtaattgtcgacgaaatcgagggcgactgggcaaaagtagtcgttccttcccaacaaagttttcaagatgagcgcggttatcctggttggatgcttctttctgacttagaagatacagataaaactagcgatactggtgagaaaatcgcagttgttgtgccaaaagcagaaattacatacgaaaatggggaaacgcgcactgtttcatttggcacacttttcaccaaaatcgctgaaactgatgatagctacacgattgaaacacctcatggattagcgaccgttttacgaactcaagtagatttacaacataaacaaggcgacaacattggcatcactgtggtgcaaatggcgatgcaattccttgacttaccatacgtttgggcgggaattagcagtgctggttttgactgttcaggatttgcgtttactctttaccggacatgtggaaaatatatcggccgcgatgccacagagcaatctttcagaggggaaaaaattgattacgcaaacgctgaaccaggagatttgctgttttttgcttatgaggaaggcaaaggggaagtccatcacgtgggagtttacatcggaaatgacgagatgattcattcgcaaacaccaggatccaaagtaattttaactaaaatcgcaggcagtaagtacgaaccagaactttgtgtgacctcaagacatcgataaagggggtggatgaaactgactaattatcaagaaattaatcaagatttcaacataattgattcaaaagcactttttatatcagatggggaaaaggtgctttttgcagaaaatgaaaaccagctttttactgctgcaagtgtcatcaaactaccgatttatttatattttttcgaaaaaattgccaaaaaagagttagacttacaaacggatttccaaattccaagcgaaaaagtagtagctggagcaggaatcatccaaatacttccgcaaaaaagaatttggacactggaagaattactgcatttaatgatagctgtttcggacaatacagctaccaaccaattaatcgagctagcaactatcaccaaactacaatcatggttacgtgaaaacaactgggaagatggaattcagctggaacggcaaatgatggatttcacgaccgtaaagcaaaataaaatcagcgctaaggcagccgtgaccattttccaaaaaataatgatgcttagtgaagcttatccagacttaaaagaaactatccggcgtccgctactaaatcagcaatttcgatccaacctagtgggcacgttggaagaagccggaatttcggggcttcaaatgttaaataaaacgggcgaactaaaaaatatccagcatgatgtggccgtttttgagtataaaggaaagaccagatttgcagccgcactgacgaataacacgggattagaagcgaatgcgacagcttggatgcagacagtcggcaaacaattattttctgagatgacataaaccaaaatagggggaactaaaatgaaaaaaagattagcgttagtttgtattatgattctatctatctcaacctttttaatggcatgcggaggaaataaagacgaagcgagcaaatcacaaggcaaaaagacactgaaaatcatggaaaacgctgaagtttcttccatggactcaactttatcgcaagacgttccaagtttcactgaacaaggacaagtttttgaaggtctttatactttaaacgacaaagaccaagcagttccagcaattgcaaaagatatgccgaagttaagtgaggaccaaaaaacatatacaatcaaactgcgcgacgatgccaaatggtcaaacggcacgaaagtcactgcaaatgatttcattttcgcttggaaaaaactagcaaatccagacaccgccgcccagtattctttcctgcttgatgggaccgttaaaaacggaaccgacgttgtaaatggtaagaaaagcgtggacgaactaggatttaaagcccttgatgactatacaattgaaattcaattagaacaaccagtaccttatttcacttcgctcctagcattcaactccttttaccctcaaaatgaagattacgtaaaagagcagggtgataaatacgcgcagagcagtgaaaacatgatttacaatggtccttttgttatgaaaggctggacaaacacagaaaaagcttggactttggaaaaaaatcccgagtactgggataaaaagaacgtgaaatccgacaaaatcgaagtgagcgtagtaaaagctccgaacacagcagtaaatctatacgacactggaaaacttgatgtagcaacactttctggcgactacgcttcacaaaaaagcaacgacaaagactaccactctgagctagatgcctacgtgactcacctaaaactaaatcaagaactggatgggaagaaaacacctttagctaacgaaaacttaagaaaagcactttcccttgcagtagataaagaatcacttacgaagaaaatcttggcagatggctcaaaagcaatttatggctatgttccagaaaaatttgtcacgaatccagaaactggcgaagatttccggaaagaaagtggcgactacatgaagcaagacaaagctgaggcgaaaagctattttgataaagcaaaacaagaactcggtggcggtgaagtgactgtagaactgcttaactctgatttagaatcaagcaaaaaagtcggcgagtacctacaaagtcaactagaatccgcattaccaggcttaaaagtaaacttgaaaaccgtccctaaaaagaacttattgcaactaacacgtgagcaaaaatacgaaatcgttttatcaaactggggtcctgatttccaagatccacttacattcctaggaaactacacaacgggaaacacatataatgcgagcggatattcaagcgccgactacgataaaatgataaacgcaacttcaacaacactcacaactaaaccagaagaacgctgggaaacctttatcgatgccgaaaaattactaatagaaaccgatgcagcaatgatcccgctctatcaaactgcagtatgtaatttgaaaaaagatactgtaaaaggaatcgttcaccataattttggaacaagcttttcctataaaggtgcttacgtagaataaaaggagagagcaaaatgaaactttggatttccgtagatatggaagggataaatggccttcctgatgatacttttgttgattctagtatgcgaaattatactagaggacaaaaaataatgacagaagaaactaactgggtagtagaagaagctttaaaagcaggatatgatgatgttatcgtgaatgatagtcattcaaaaatgaataatatattgatagaagatttacacgaagaagcaagactcatcactggtgacgtaaaacctttttcgatggtgcaagggttagattcaagcgcggatgcggctgtttttatcggttatcattcgcgcgctggtcaaccaggcgtaatgagccactcgatgatctcaggcgttcgtaatttttatattaatgacgtggtaattggcgaatttggcttaaatgcatatgttgcgggagcatacggagtcccggttattctcgtttctggcgatgattatattgcccgcgaggcgaaagaactcatacctggaattgagacagctgttgtaaaagaagcggtatcccgttcgtccgcagtagctttctctaagtcaaaagcagagaaaatcatccgcgaaaaagtggcgctttcgttaaatcataaacaagccgctgtactggtaccgccagaaaaaacagtattaaaaatagagttctgtaattacggtcaagcggagtgggcagcgcttgtaccaagaactaaaatcattgatgaaactaccgttgtgttcgaagcggaagatatattagaagcgtaccaagcgatggttgcaatgacggagcttgctatgaagtgcgccttttcataaaacaaagccgaaactttctatagaggagtttcggctttgttgtttaattaattacaatcttacaaatcgcctcctcaaactgtcactaaatctccataaagttgttaattatagtgcgatacttccgggaagtgaggtagattggagttactctattgtcatatgatatttgataataacaaaacttcaattgtaaaggatgaatttgtaatgagtaaaaacggaaatcttttaaaaagagtagggttagcgtttctaagtgttttaatcatagctagcacggttttccaaacgaccattgtaaaagcagcaacgagttacggatctgagtttttaaatacagtagaacttttagataaagatggtacgccaaaaacggattttggctattacgataatatgaatgtgcactacacttggtcgattcctaactcaaccaatgtaaaagcaggcgactcaatggatttcgcattaccaagccagttagcacttgcgacagatcttgcttttaatgtgaaagacagtaaaggccagacagtcggaaccgccactgtaaaacgagcaactaaccaagtaacagtcgtatttagtgattatgtcgaaaaacattcagatattaaaggtgaacttgatttttggactacatttaatcaaaaagtaattactgggaacgaaaaaattaatttagaatttccaattgaaaatagcacaattaatgtagacgtcaatgttggtgaaaaaacacctgttagtccaacagaaacgattttcaaatatggttgggttgatgctaacaatccgagtttaattcattgggttgtccgcgtgaactatgctcaaaaaaatattcctaatgccgtttttactgatattatcggtgcaaagcagacgttgaattttgactctatcaaagcttttcacggaacctattcaactgatcgcgtattcacagcaggcacgccgatttcaaataccaatttttctaagacaagtgatggttttagcgtaacattgggaaatttaacggactcggtacaaatttcatatacaacaactgcgacagatggcgggaagtctactcaatatgataatactgctaagttatcgggcgaggattttgtaacgaaacaaacgtcaacttggaccccagcatccggtggtggaggtggagcggacggcacaacgggttcggttacactaacaaaacaagatgctaaaacgaaagcaacccttgaaggggcagaatttaaattagtcgatgcaaatggtactattttacaagaaaatatcacaacagatgcgagcggccaattaaacgtttctaacctcaaattcgctacctaccaattaatcgaaacaaaagccccgacaggctataaactggatagcacgccagtagaatttacaattggcgaaaataataaagaaattacggtaacaaaagaaaataccctggacactggcgcagtagaacttactaaagtagatgccgcgacaaaagccatacttgcaggagccacattcgaattgcaagataaagacggcagcgttcttcaaacagacttaaaaacagatgaaaatggtattttaaaggtaactgacctagtacctggcaattaccaatttgtcgaaacaagtgcccctaccggctataaattagatagcagtcccgttccatttgaaattattgcagatgaaacagatcaaatagtaaaagtaacaaaagaaaacatcttggaagtcggcgcagtagaacttactaaagtagatgccgcaacaaaagccctacttgcaggagcgacattcgaattacaagataaagacggaaagactttacaaacaggcttaacaacagatgagaatggtgtgttaaaagtcactgatttagtcccaggcacataccagtttgtagaaactaatgcgccaattggttatgaacttgatgctagtcccgtcgttttcgaaattatctatggagaaaataatcaggttgttaaagtaaccaaagaaaataaggcagaaaccacaccgcctccaacaccgctaataccatcacaaccagtgccaattgaaccaaaagttccaattgtccctgaaaagccagtgcaatcagaaaaaagtgaagaaagtccaaaattatacaaaatatccgcagctaaaaagttaccaaaaacaggcgatacacaaaactgggcgggattgggaatgattcttctagccctgtcaataagcggttttcttataaaacgaaaataaaaaagaagacctagataaatcatctaggtcttctttttaggtcaataattattactaaagttcacaaaacgttcacaaataggtggaatttttccgaaaaaacgtcaatcgagataaattttacggtatactcacaatgaattagtaagaatattttattgggattaatttgaaaaggatggtttttatgaaagagcgcgtcattttaaaacgtaatctaaagaaaataggtttagcacttcttagcgttatcttacttgcaaatgttttatttcaaactaactttgttaaagcagcaactgactatggctctagttttttgcaatcagttgaattgttagatgcagatggtaatccaacaactgattttggttattatgatagtgttcaagttcattatacttgggcaatccctaattcgagtaatgtgaaggcaggggatacaatgcaatttgtattacctccagaactacaaatagtaacagatttagatttttcattgaaagaccataaaggcaatgtagtaggaaatgtagtcgcaactaaagacaccggcaaagtagtcattacttttacagactttgtagaaaaaaactcagacgttagcggttatcttgatttttggagtaactgggataaatctttagttgaaggaaacgaaaaagttccattagtatttccagtaaatggcactacagaaactattaccgtagaagtcggcgggaaaaatcaaatcgatccaaccgaaactttatacaaatatggctgggctaatgccaaaaacccggaacttatccagtgggtagttcgagttaattatgccaaagaaaacattcaaaatgctgtttatgaagattttgttggacctaaacaagtaattgattttaattctatccaagcagtacacggcgagtttgaccctgatgataatttcaccccaggagctgcagtcccgtcctcagacatcattcaaacaacagatggttttaaagtaaacctagggaatttaacagattctgtaaaaatttcttactatactacctccacagataacggagcctcccctagttatacaaataaagggaaactaactggcgacaactatgttacccaagaaatcgaagtggcgaccccgacatctggcggtagcggcggcggagaaggaacaaccggctctgtagaattaactaaaacagacgataccgtggagagaaaccctctagcaggtgccgaatttaaattagtcaactcagcaggaacagtaatgcaagaaaaccttgcaactggtaccgatggaaaactagctatcacaagcttgaagtacgacacatatcaattaatcgaaacaaaagcaccagcgggatacgtattagatgcgtcaccagtagaatttacaatcgatgccacccaccaagctatatttgtttcaaaagaaaataaggcaattaaaggctcggtttcactcataaaagaagatagtgaaacaaaagcaactttagcaggtgccgaatttgaattacaagataaagccggtaatacgttgcgctcgaatttaatcacggataacgctgggaagctaaatatcacagatcttgcgcttggtgattatcggcttgtagaaacaaaagcaccagttggctatattcttgacgccaccccggttaactttactattagtgaagcacaccttaatttaactgtgacaaaagaaaacacgaaagaacctgaaatacctggagttccagaaaaacctataattccaaataaacctgatattccggaaaaacctactgtgccaaaaacaccagtagtaccagataaaatagtaagttcagatgagcaaccaacaacattaccaaaaacaggagatagctcatttgctagcggcttcggaatcctgctcgtagcgctttctaccgctggattaattgcatttagaagaaaataacaaaaaaggaaccaaaagcacagagatagtcgctttcggttccttctttatattgtccgagtttgatcttgtaaaacagcttttaatgagtgataagctggaattgataaatttaaatccactcgatttatttgttgtgccatttttggttgaatgccagatatgaaagcctcgacacctaaaagcttgagaacagttactaaattatttagcatgtctccaagtgcatcgtcaaagtaagttattcctgataaatcaatacaaagttgctcaacgcctagttgaacgcatttcttagaagtaatttcagttaatttatctgctctttcgcggtcaattcctcccattaaaggaagtatcgccaatttgtcagttatagaaataaccggagtgctaatttcctcaattaaacgatgttgttgttctaaatgtttcacaatatcgttataatacattgcagaaaaagcttcattgattcggtcaaatccgtgattaaccatcgctaagctggaagaaaaatcacatttagaaacctcatcattatggatgcaaaaatcgttaactgccgaaacaaattcacggcgtagtttatctagggtagtaattacttcaggcaaaggaacttcattttccatacgacgcgcgtacatgttatcaagccatttatcaagtttcagaaagaaagcctttttacctgtgaagtaagaaatgattaggtcagctgtttgttcgctatctgcgcgaagttcatctttatatcgcggggaataaacgaaactcgtatacgtattttcattttcataaattttcgaaagccagttgttaataatttcctctgtatgggcccttaaataaagttccatacttccattcgcttcattcataccagacaacccctttaagtctaagtataatacttttcttttattctatgctcaaaaaggtgtactgtccatttatattttggaaaaaaagctaatttattgaaaatgtaatattctttaacaaatcagtcgttatttttttgttaaaattccgaagctatttaagccttgtcatggtataatattacaatatggatagaaaggaagttttttgtgggattacaggatgaacttacaatgatgcaaccagtggtcatgaagattttttcaaaaagtgtccgcgaaaaccgattatctcacggctatttattagaaggctcaagaggtacaggcaagaaacgcacagcactttggttagctcagagtcttttttgtttggagcggactgaaaccaaccttgcttgtggcgagtgtgccaattgcatgagaatagcgagtcataatcatccggatgttcatttgctagagccagatggagctagtattaaaatagatcaggttcgcgcgcttaagcaagaattaagtaaacgcgggatggaatcagatcaaaaagtagttatcatttacgatgcagaaaaaatgactgtgcaatcagccaatagtctgctgaaatttatagaagaaccagaaggcggtttgttattactatttttaacgacaaatcctgggcaaattttgccaacaattcaatcaagactgcaacctgtcacgtttaaatcgctaacttttgatagtctcgtagcttcactaacgactgcgggcatttccgaacaaaaagcgcggatttatgctagtattactggtagcgtagaagaagcgaagacgtttgaagagggtgactggtttagtgatgcaagaaatgttgtcatcaagttatacgaaggaatacaccatcaaggaacgagcccattaattatcattcaagaatcatggatgccactatttaaagagaaagataagatggcgcttggactcgaattattgttactgctttaccgcgataggctgcatcttacgcttgatgagaactacgaacctatttgcactgcgcaaaaagaaatgctcggacaagatgcgctacgtaagtcactgtccgaaaccacaggggaaatcgagaagattctcgctgcgaaatcaaaactggattccaatatgaacacgcaacttctaatggagcagttagttcttgaaatccaagggaggtaatcgccatgcttaaaattgtaggcgtccgttttaaagacgttggtaaaatatattatttctcacctggagatctggaaatcacagaaaaccaaggtgtcatcgttgaaaatgcacaaggtatcgaatttgggaaaacggtcattgaaccgcgctatgtggacgaagaagatgtcgttttaccgctaaaaaaagtacttcgtgttgcaacagaagcagattataaatgtgtcgctgaaaatggcgactcttgtcagaaagcctttttactgtgtgatgaaaaaatccgtgagcgtgaattagatatgagcttggtggatgtggattacacgtttgatcgaaacaaaattattttttactttactgcggaaggtcgcgttgattttcgggaactcgtgaaagatttagcgtctgttttccggactcgtatcgaactgcgccaaatcggcgttcgtgatgaagcgaaattgcttggcggaattggcccatgtggtcgtatgctttgctgttccactttcctaggcgacttcgaaccagtttctatcaaaatggctaaagaccaaaacttgtcccttaatccaacgaaaatctctggcttatgtggacgcttaatgtgttgtttgaaatacgagaatgatgaatatgagcaagcaaaacgtgaaatgccagatgttggtgtaaaagtaaaaactccagaaggcgtagaagcacgtgtttcgggaatcaacttgctgtctagaatcctacaagtgagtttgcccgaagaagagacggttatagaatacgaattggatgagttacgtccatataacgaatttctaaaacaaccggcaaagtcttgaggtgaaaaaattggataaaaaagctatttttgactcagtcagcaatatggaggagcaaattggcgaattgtatcagcaacttggagatctaaagacaaacttaggcgaaatgttggaagagaataaccggttaaaccttgagaatgagcatttacgacgcagactttctttgacggatgaagtggctcctgaaccagtggccgaagaagaggcagttcatggagtgatggcgccgaatcgcaaagaagcgatgcaacaaatgattgaactcggggaaggttatgataatcttgtccaactttacaaggaaggatttcacgtttgcaatgtacatttcggcagtccgcgtggcaatgatgaagattgtttattttgcctatccttgcttaacaaaaaataacatgacgggcctttctcgattcaggagaagggctttttgctagaaaaggtgaatcatttggaaaaactcaaattaataggcgatgaaaggctcgattatttactagcagaaaatttgcggattattcaaagtccatcggtattttctttctcgatagacgcggttctcctcgcgaaatttagttatttaccaatccgtaaagggaaaataattgatttatgtagtggaaatggtattattcctttactacttagtacacgaacaaaagcgcaaatagttggcgttgaaattcaagagcgacttgcagacatggcgaaaagaagtgttgcttataatcaactggaagaccaaatcgaaataatcgaatacgatttgaaccatattaccgatttaattccaaaagagcgcgcagatattgttacgtgcaatccaccgtattttgcaaccccatctacaagcctgaaaaacgaaaacgaacattatcgtatcgctcgtcacgaaattatgtgcacgctagaagatacaattcgagttgccgcaagtcttttaaaacaaggtggtaaagcgaattttgttcacaggccagagcgcttactagatattattgatttaatgcgaaaataccgcttagaaccgaaacgcatccagtttgtccatccacgaatcgaccgagaagcaaacacggttctcgtagaaggcatcaaggacgggaagcctggcgtgaagtatgtcccccctgttatcgtgtacgatgagctaggtgagtataccccggttattaaggagattttatatggcgaaagcgaatgaacatttcttttacgtattaaaatgtagcgataattcttattatggtggctatacgacggatgtaatgcgccgagaagccgaacacaatgcgggaattagatgcaaatacactaaaacacgccgcccagtaaaagtcatccattttgaaaaatttgaaacgagaagtgaagccactaaagctgaagcggctttcaaaaaactatcgcgcaaaaataaagacagctacttaagcgaacgggaggaggagtcgaagtgatacagagccaaaaaagttttagcggagacattcaaggggcgctatacttagtcccaacaccaatagggaatttagaagatatgacattccgcgcaatccgaatgctaaaagaagcagatattattgcagcggaagacacgcgaaacaccgtgaaacttttaaatcattttgaaattacgacccgaatgacgagttaccatcagtttacgaaagagaataaagaagataacattattcagcggatgctagatggcgaagtggttgcgctggtcagcgatgcgggtatgccttctatttctgatccaggttatgaactagtccaaaatgcgctaaatgcaaatattccagtcattccattaccgggcgcgaacgctgctttaaccgccttgattgcttcaggtttagcgccccagccgttctatttttatggtttccttcctcgtcaaaataaagagcgcacgcaggcaattgaaaaactagcagcgcgcgaggaaacttggattttatatgaatcaccacatcgtttaaaagaaacgttaaaagcgatcattaaaatcactggaaatgaccggaaaatggttttatgtcgcgagcttaccaaacgttttgaagaatttttacgaggaacagttgaagatgcgcttaactgggcaaccgacgaagaagttcgtggggaattttgtattattattgaaggaaatgcgaacccacctttagaggaagaactactttggtggcaggaattggatattaaaacacatgtaagtaccgtgatggaacaagaaaatattagttctaaagatgccattaaaaccgttatgaaagcgagaaatttaccaaagcgcgaagtctacgctgcttatcatgaaataaaataaaaaatcatgcgagagatcttgttctagatctctcgcatgatttttttaaatcgtatcaccaaagcgacgtttgatttcttccattaactccgcagctccttctttactaagagtcagcttaccatccacaaattttttattatcaacagaaaactctccagtaacatcacaaaccaagccagcagaatatttttttaatacaattgcatcttcatcagtaaaaatttctaaagggtcttttacgtttaaattcattgtgcgtctgatttcaatcgggataacgacacgacccaactcatcgatttttcttaccattccagttgatttcattttctcaccttcttgataattttaattcattttaacagattatcaatataataggaatgaattcgaggtgaaaagggtatagaccataagcagaagaattagggggaataaaaaatgaacatagttatcgcattaattccggcagtgatgtgggggattatgccgttagttgtttcgaaaattggcggtaaaccgaggcaacaaattattggtacaacattcggggcactagctttcgcaatcggcgtttttatttttacaaatccagaatatacagcaacaatcattattgctagttttatttccggggcattttggagcttagggcaaatgaatcagttccgggcctttacgcaagtgggcgtttctaaaacaatgccactttcaacaggaatgcagttagtcggtacctcactatttggtgtttttgctttccatgagtggggaacaacatcgaagctaatcctaggtttttccgcgttagcacttattattatcgggatatttttaacgagttatcaacaacataaagacgaaaattccggccaaaatatgaaaaaaggaattgtcactttacttatttcatcagtaggttatgtaggatatgtcgttatcactcgttggtttgatattagtggatgggacgcgattttacctcaagcaatcgggatggtagtcgcaggattattattttccatcaagtccgaagaaaaacgttttacaaagcaaacatggttaaatatgattccaggggtgatgtgggctactggtaacttggctctacttttctcaaacaaattggttgggatcgctacaggtttttcactttcacaaatgggtgttgtaatttcgaccattggaggaatccttttcctaggagagaaaaaaaccaagaaagaacttattttggtcattatcggggttatcttagttattatcggtggtacgatgataggaattgctaaaagctaagaccaagcttccggtttgataaaatgctatacttaaattaatctaaattaaaggtggttatggtgaaaatgaatgcgaaattagaagtaaatggtgagcttgtaaaagaatcttatgtttatttattgtcgcggtatctcgttttacgtcaagaaaattttgatacgaaagaagataaaattccatataacacacttaagcataattcggtagctccagcagatgcgaattttgtgaatcctaactttgatgtggtttattcagaagcttggatcgctgtagatgacgataatgctgttattttagaagtaccagaaattaaaaatcgctactatactgtccaacttttagacggctggggcgaagtggtaacaaatatcaatgaacgtaactacccagatcatccatacggaaaatttgctttcgttaaaaaaggaacaaatccttccgttccaagtgacgctgtaaaaatcgaattaccatcagagaaagtaaaagtactccttcgcgtagaacaaaaagacgatcctgaaggcgcagtaaaacttcaaaaagcattcaaattcgacgcaccagataatataaaaatcaaagaaccacttgagattccacatttcactaatgcagatttcttattagaagaaatttattccaatttagaagaactactagcaacgtatccagataaaatgccaaaagcggctgaattccaagataaagcaagacaagttgcagcttatattgagcttggcgacgagcaaaaagcagaagtaagaaaccttattgtaaaagaagccattccttattttactgacggggcaaaaggtttcggaacgcaaaaaggcggatggtcagttacttatgtggcaggcgccttcgaaaacgacattttagcacgagcgattattaattacggaggtatctgggcgaactcgatccaagaagctttatatttcatcgggcaacaaggtacggacggcgaacttttaagtggagataaagtatacaaaatccatttcccgaaagatcaacttccaaatggccttgcagaagctttctggtccgttacactctacggcgttccagactatcatgttattccaaataaactaaacaaattcagtatcaatgactatactggtcctaaaacaaatgaggacggaagcctatcactttatattgcagcagaaaaaccagcagatgttgatcctggtaattggctgccaagtaaagctggcaaaggattctcactaaacttccgactctatgttccgaaaaaagaagtattagaaggaaaagtattcttaccaccacttgaagtcctttaataaacgaaaaaagctaagtatgaaactatcgatttcagatagtaacatacttagctttttttatttctttttaaataatagtaaaggggcgctaattaaaagaagtagagctccgaagatagtggatgatgtactttggtcagtatcaccagtttttggtaaagagttataggttgttttttctattgaatgactagaactagtagtagctggttttacagtgaccggattatgagctaccgggttatctggattaacagagtcaactgatttaacgggatcaaccgtaataggtgttggtataacggcagcttttttataaatatagtcaattgtttgttcagtatcagtgaaagtaccagttgcatttgtaggtgtggtttctaaagtataaccagcaatttttttgcttgttgattggtaattactattgagaactccagttaatgtatctgattctgcgattttatttccatcgatatcaagataattcactgtgatatttgccccggctattggagcaggagttgctacgtgaactgtaacttttactacatttgaaacgttgcctgccttatcggttgcttgaacattgacggaataatcgccactaactgctaaattaacagaggaagtaaaatcgcttgagaggctaacagtggagtcgtaattatcagtaacactagcattaatatatgttaaaaattgttcttccgtaacactgcttccagggctgtacgtgatttcagttttatcagctttaacaacaggagcattaatatcttttggttttaaagagccagtagaggttgacttgttaccggccttgtcttgacttgtaatagtggcagttgcaactaaggaatcgattttggcttctccaccttcacctgaataagaggttttccagtcgaattttacttttgctttggataaactgtcccaactggttactttgtcgaatttaaaagtaacggtattagtggaactgtcaaagctagttgtccctacttgatttgtaatatcttccccaccaacagaaacgtgtaaatccgtatagttcatgcccgttggtagagctaattttatttccagtttatagtcttctttggtttgattcgttaaatctggaaatgtaatggttgatgtatatttatatggaaaattctcattggtgttttgaagtaatgaaatatcatttgtatcacgagtatcagcaagtgcagaaacgggcgtaagtgctatttggccagccagagtgcttaaaatgataaggctagcaatagtttttttcttagtaaacatttgttaaataacctctttcttgatgttgaaatttaattcaatttaattgtagcactaaattttggagcacaagtgtactagtggtagtataatgcggcacactttgtcgaaatagtggctaatgagaatcataaaaatataaaacgttcatttaaactttggcgattagctctattaaatacttttactccgaaaacctctatcatcttcctgttatttccgctataatgaagtaattgaaaactaaattaaacggcaaacaaggaggaaaacgatttgaacattatgattgcgctgattcctgcattactttggggaacagttccgctaattattacaaaatttggcggttcgacacgacaacaaacaatggggatgacgctaggggcgctcacttttgcagtaatcgttttcttctttactgacccggtttatacacttaaaacagtaggaattagttttataacagggtgtttatggactgtcggacagatgttccaattgcgcgcttttaaaatcatcggcgtttcaaaagcgatgccgatttcgaccggaatgcaattagttggaacaacactttgcggtgttattctatttcatgaatgggatacgacgttacgcattattcttggatttatcgcacttgcgcttatcgttggagggattttcctaacttcctatgcggaaaaagaagaagatggaactaacgctttaaaacaaggcttaattacattagttatttcatctttagggtatgtagggttagtcgttctcattcaagggtttaaaatcgacggaattaatgcgattttaccgcaagcgattggaatggttttaagtgccttaattatgacgcatagtggtggcacggaaaaacgttttaataaacgtacattgttgctcattataccgggaatgatttgggcagcaggaaatgtagcgatggtacacgcaaaccaacttgtcggagtcgcgactggtttttcactttcgcagttaggtgttgtcatctcaactattggcggcattgtactattaaaagaaaagaaaacccaaaaagaaatgctttatgttattgtgggcgtagttttagtcgttctcggcgggattttaatcggcgtcgcaaaaggcgcttaattaattatttcgtttagcgcgaaaaatgatataatgatactaattgttttatttttaaggagggaattgtgttgcctgaagagaaaaatacgttttatattacaacaccaatctattatccaagcggaaaagcgcatatcggacatgcttatacgactgttgcgggggacgcgatggctcgttataaacgcttaaaaggatatgatgtgttttacttaactggaacagatgaacacggtcagaaaatccaagcaaaagcaaaagaacgcgggatttctgaacaagaatacgtggatgaaattgcagaaggtttccaagaactttggaaaaaactagaaatttctaatactgattttattcgtacaacacaagaccgtcataaaacatccgtagaaaaaatctttgaacaacttttagagcaaggcgacatttacttaggtgaatacgaaggttggtactctgtttctgatgaagaatactttacagaaacacaattagaagaagtatacaaagatgaaaatggtaaagtaatcggcggaaaagctccaagtggtaacgaagtcgagcttgttaaagaagaatcctactttttccgcatgagcaaatacgcggatcgtttagtagaatattataactcgcacccagaatttatcctacctgaatccagaaaaaatgaaatgattaacaatttcatcaagcctggcttagaggatttagcagtatctagaaccacttttgattggggtattaaagttcccggaaatccaaaacacgttgtttatgtgtggattgatgcgctttctaactatattactgcgcttggatataatacggacaatgatacgaaattccaaaaatactggcctgctgatgtacaaatcgttgggaaagaaattgttcgtttccatacgatttattggccaattatgttgatggcactagacttaccacttccaaaaatggtattcggtcatggctggattttgatgaaagacggtaaaatgtcgaaatctaaagggaatgtagtagatccttacatgttgattgaccgctacggactagacgcgcttcgttactatttattacgtgaagttccatttggttcagatggtttatttacaccggaagactttgttgaccgcgtaaactatgatcttgctaatgacttaggaaacttacttaatcgtacagttgcaatgattaataaatactttgatggtgaaattccagcttatcaaggtaatgtaacagaattcgatcaaacattagtagatttcaaaaataacgtcgtgaaagaatacgaaggtagtatggaccatatgcagttttcagtagcattaaaccaactatggtcactaatttctcgtacaaataaatatattgatgaaactgctccatgggcactagctaaagaggaagataagcgtacagaactagcgagcgtaatgacacatttagctgaaaacttacgtatcatcgcagttttacttcaaccattcctaacaagaactccaggtgaaatcttcttacaactaggcttgcaagaagaaaacttgaagaaatgggatagcatctatggctacggcgaaattccagaaggtacaacggtagtgaaaaaaggtacgccaattttcccaagactcgatgcagaagtcgaagttacttatattcaagatgaaatgaaaggctctgcaccagctcctgctgaagaaactgcagaagttgaagcacttgaaaccccgcaaatcggtattgaagatttcgacaaaattgatcttcgggttgcggaagtaaaacaagtagacaaagtgaaaaaagcagataaacttctttgtttccaattagacttaggtgaaggtaaactacgccaagttctttcaggtattgcagaattctaccaaccagaagagttaattggcaaaaaagttatcgttgtttccaacttaaaacctgtgaaacttcgcggactaatgagcgaaggcatgattctctcaggagaaaaagatggaaaactaagcgtaattgaagcaaatagcgcacttccaaatggcgcaaaagtaaaataataaaaacgagccctaattcgctggagttagggttcctttttttatcgaaaaaaacttttaaaaaaaagattgcataatgcaaacgattacaatataatgtaactatacttacttaattcaatgaacgaagtaagtgctcatccagaagtaaaggagccggactatggatatcttaagaaaagggaacaaagacttaattaaagatataaatcgctataccgtgctgaatttaatccgtgaaaaaggagaaatcacacgtacagaaatagctaaaaaatgcgattttgggatgtctacattaacgtatattctagatgacttgcaacaagaaggcattattctagaaggtgcggaaacatcatctactgggggcagacgtgccaaactagtaagatttaataaagattatggatttgttgttagtgtcaaagtagaagaggaacaacttctttttgcgttaacagacttaaatgcagaaattattaaaaatacttccataccattttcatcagagaaaaaaccggaagatgcaatagacttaattgctgaaaatgtaaagaaaatgtgtaaaaacagagatatgaaaaacttgctaggcgttgggattgctatttcaggtctagtgaatcgtaaaaaaggaacagtaatccgctctactatgctaggctgggaaaacgttgccttagaagcgatgttacatgttcatttccctgatattccagtgtatgtagataaaaatataaactgctacacactcgcagaactttggttaggtgaagggaaacaatccaataattttgcaaccgtttcagttggtgctgggcttggtttatctgttgttattaaccgtcaaatttattacggtgcgcaaggtggagccggagaatttggtcatacaacaatccaaccaggcggatacaagtgccactgtggtcaaaaagggtgcttagaaatgtacgcatccgaattttacttccgaaaccgcggcgaagaaataaaagaagcttttcctacatctgaattaaatgattttcattttgataatgtagcaaaaagcgcgcgtgctggtgacgaaatggcgatagaacttatgggtaaaatgggagaatatttaggatacgggattcgaaatatcattaacacctttaacccagagaaagtaattattgtcggggaaggcttacaccacagagatttattcttaactaaaattgatgaaattgcttcacagaactttttttcaggggctggctttgaaacggaaattacaacaacttctctagaggatcctgcgtggttacaaggtgcggctttactagtcatccaccaactattccaagtgccaatctatgaagaagaacaaactttattacgttaaaagtacataaattatttcgggaggttatttttacatggttggtatgactagaaagaaaacactattttggctatgcattttcttgttgcccaatttattaggttttctcatttttattgctatcccaatccttggctcgctcggtattagttttaccgattgggacttagtgagtacgattcactttactggatttgaaaattacaaacggttatttaatgacccagaattttggaagtcatttagaaatactatcacatttatcatcggttacttgccaagtgtaatgattcttggtctagcttgtgccttgatgttaaaccaaaaaattaaacttagaccatttttccgagcagtgtacttcttacccgtgattacttcatgggtagctgtttcactcgtttggaaatggcttttcaacccttcatacggtctcatcaattatttcttatcattaattggaattgctggaccgaactggttaacagacccacaaacagcgatgattgcagttattataactagtgcgtggaaagatattggtttcgttatggtactgtttttgggtggtttgcaaaatatttcaccttcctattacgaagctgcaaatatggacggagcgtcaaaacttcgccaattattctcaattaccatcccgcttcttactccaactacattctttgtgacgataatttcgcttatcaactcattccaggtgtttgaccaagtgatgattatgacagaaggtggaccaagtggagcgacgatgaccttagtccaaaacatttacaatcatgcatttagatacttcgaaatgggctatgcttccgcgatgagttggatattgtttattgttattttcatcattacaattattcaaaataaacttcaaaaaaggtggtccaattactaatgaaaacagaaaaaagtggttcaccaaaatggcaactaataaaaaatattcttacctatacgattatctgtcttggtggaattatcatgcttatgccgtttgtttggatgatttcaacagcctttaaaacaggtgcggcaaacatggttctaccgccacaatttattcccaaagaaccgacaaccgcaaacttcactcaagtatttgaaatgttcccaatgttaagatttttaatgaactcagttgttgttgccgttgtaacgacacttggtcaaatgctgttttgttcgatggcagcatacgcatttgcgagaatacctttctggggccgcgataagttatttttactttatttagcgacaatgatggttccagctcaagttacgatgattccgcaatttatcttaatgaaacagtttggttggttagattcttatgcagggctgattgtaccagcgttattcagcgttttcggcactttcttattacgccaagctttcatgggaattccaaaagaattagaagaagccgcatttatggatggggcaaatcattttactattttccgaaaagttattttaccacttgcgaaacctacatttgcaacacttggaattttaacttttatgcaatcttggaacagttatttatggccattaatcgtgacaagttcacaagaaatggcaactttacctttaggattatctcttttacaaggtagatatggaacgaattacggcttaatgatggcgggtgtacttattagtgttatcccgattctagcagtgtacctttttgctcaaaaatatttcatccaaggaatggctatgagcggaatgaaagaataaaaaaccaacaaaaaaggagtgttacaaatgaaaaaaggtttattattgttaatggtagttgtactgtctgtatttggtctctcagcttgcggcggtggtagtagcagcggcgataaaacggaaataacgtattatcaattctctgccccagcggatggaaaagcacttgataaaatggtaaaagaatttgaaaagcaaaaccctgatattaaagtaaacgttcaaacaatcgcatttaacgactatttcactaaactacaaacacaaatcgcaggtggcgatgctcctgatgcctttgaacttaactacgaaacattcatgcaatacgctgaaaaaggtgttcttgcagatttaacaagctatatcgaaaaagataaagattttgatccatctactcttaataaacaagcgtatgatgctttcaaatatgacggcaaacaatacggtatggtagaaagtttctccaacgttgtaactatttataataaagacctttttgacaaagccggagttgaatatccaactgctgactggacttggaaagacgaagaagctgcagcgaaaaaattaacagatgctaaaaataaagtttggggaacttcccaaccagtaacaatgaacgaattcttcaaagtagctgcacaaaatggtggttcaattttcgataaagatatgacaaaaactactattaacagccctgaaaacgtagaagcattaactcacttaactaatgaagtaacagaatctaaggttgctccttcaccatctgatttatctggacaattaccagaagacttattcatgaatggtcaaatcgcaatgcttcatacaggtatttggttattcgatatgttccaagatgcaccatttaaatgggacgtacaagtagaagcaggcaataagcaaaaagcgactcacttcttcgctaatggaatcggtgtttctaaagactcagataaaaaagaagcagcgttcaaatttgcttccttcatgagtgcaaataaagaagcggcaaaaattagaattgcaaacaactgggaactaccagcaaccgaaaataaagaaattttacaaccgtatctagatgcgactcctccagataacagagaagcagtttttgagtccttacaatatatggtattacctccagttgtaaaagattggaacaaaattagtgattatacaaactcagaatttgaaaaagtgctaaacggcgaatctacaccagaaaaagcactgaaaaatagtgaagataacatcaacaaaacaatgggctttaaataagtaacgagagtggcagggacgtttgtaagtacctttacaaattagactgccactttagtatatccaagaaaggaaataaaacatgtctaaattcacaaaattaatgcagggttacttgcatttaatagaaggaaaaaatgaaaatatcaagccaatcctactggaaacaaaacctgactttacaactgattcagtacttgaaaccgcgtcttggctatggcttagcagtaaaatcaaccattatgacagagaagaagtagagccagtaattgcatttttagttgaaaactggaatcgtcctgaaaagtctatttggggttcaggtgaaaatgatatttatttagcaactatttcaagtgtatactctgcattattagatgtgaaaaacacttttccaaaaccggagttacaacaaacaattacaattatccgcgactattgttttgataatttattaaaaggtgatagcatccttactggctttaacacgcgaaaagtgtcaaccgaccagcttttatccgtgcttccgtttgggttattttcgcccgaagatcttgtaatggtggcggctgttggcaaaatggaacaacaattagtgcaagatgatggagtactgccttattcaggagctccgaaagttaattcctttgcaacggctctaatggcgctatatttcttagaaaaaagcgaccaagataaagcgttacactatttgaatatggcaatgaaaatggaagataatgatgaacttggcgcgatttttattgaaattaatcaagctttccgggcgatggaaagtgaagtatcagcacatatttcacacgatcctttcgggaatgaaaatcgctatgagcagcagttaactgaacgtacgccacattatcccgaaacagaaatgcatttttcggctgcgtgtgaagtaatttctggaatcgaagcaatccaagttgaacttgtattaaaagaaaaagactggaccattttatgtgagaaaaaagagaaaaatgatgtccaaatctgggaagcactcgttccgccgttagaagaagttggcgaatatacctattatttccgggcgacaatgaaagatcaaaccactttgacatcagatgattatactgtcgaaccaatctggaaacactggtcagaagaagcagcaatttgtgaaacagagcaaggcttaatggttttatttaaagaaaatccatcaagtgtcatcccggtcgagttcgccgtgaaatcagatgaacttgtaatcggattaaaaccttcatttgaagcgagcaatgttaaaacaaaatcatcgggccaattgaaaaaagatgatttagagattatcgtttcaaataatccagtgcgtcttgaggttcactttaaaggcaaattaattttagaatcgcataaaatttacccagcgttacaatggtataccgataaaactggcacgattaacaaagtaaaactgcatttagacgcgccaaaagaagaagagtattacggcttcggtgaacgatacaatgcattaggtcagcgcgggaatgtgcttgattgctttgtttataatcagtaccgcgaccaaggaacaagaacctacatcccgatgccgttttatcatacgaatcgtgattatagtgtgttcgttgataccgctcgttacacaagttttgatttaggtaaccaattagcggacaagcatacaattacagtcgaaataaatggctgcgatacagatatatgtcttttaatgggagatattcgtagtgcagttgctaattatatgaaaaaaactggcaagcctgcaatggttccagtctgggcgcttggaccgtggatgtctagtaataactgggaccgcgaatctgtcgttcgaaatgaagtagaaacaacgcaagagttgcaaattccgtcaacggttgtcgtattagaacaatggagcgatgaagcaacttattatatgttcaatgacgccgaatatgatgaaaaagcaccttcagaagcatattcttatgatgaaattcggttcccttcatggggcagatggccagatccaaaagggatggttgactacatccatgacaacaaaatgaaattaattctttggcaaattccgattcaaaaatacttaaaccgtcaacaacacccactaaaagaccgtgaagaagcctatatgattgaaaaaggatatgtggtgaaaaatccggatggctcgccgtaccgtattccggaaaactggttcaccgaaagcttgataatggatttctccaatgaagaaggaaaaaaatggtggtttgataaacgacaatatttgattgatattggcgttgatggctttaaaacagatggcggcgaattcgtttttggagaaggattgcagtttgctgatggtagacgtggcgatgaaatgcgtaatctttatccaaatgactatgtggaagcttattatcaatttgcgcaacaaaatgatggcatgacatttagtcgcgctggctatacgggcgctcaaaacttcccggctcactgggctggtgatgaaagatcgacttttgacgcttttagaagatcccttattgctggactttcagctggattttctggaattccgttttggagctttgattttgcaggatttaatggtgacattccaactgccgaactatttatccgttctgctgaaatggctactttctgcccaattatgcagtatcatgccgaaagtaaagccgaattcaaccaagaccggacaccgtggaacattgcctcaaggactggtgatgactcggttattccaatataccgtcatttcgcgaatgtaagaatgaacattttaccttatatttataatgaatcgttaaaatgcgtcgaaacaggcttaccgatgatgcgtgcgcttctactggattataaagaagatcctcgtgtttctgatatgtatgaccagtacttatttggggaagcaatgctgattgcaccagtgattgaagacggcgtgcgctccagagaagtttatctgccagaaggaacttggtatgatttctggaacggaacaaaagtgaacggaccaactctacgtaaatgcaaagcggataaagaagaaattccagtattcattcgtggcggtaaagccgtgctatgtaacgttgatgccactttaaaactcggctcatgggttggaaatacagtggaggaatacgatacaccattactcaaagtttatttagacggcgatttcactgaagaaattactgaccatttatcagaaaaatggctagtaaaagttaccgaaaatgcggatgaagtaactatctccgttcaaacaaatacgccagaatacgaagttgaagtaattggaacgaccaaaaaagtacaaataaagaaaggaagataacgatggatgcttccacaagttttgctattttaccatctaacgtaaaacaaaaaacagctttcccgagaaaaataaaccaagtgaaaacagctagttgggcgaataattgcctaactggcacacttgatgtcggtcatttcagttgttattttgttaatgaaaaaattgcacgcgtaacagtgaatccgtttggtgaagcggatctgacaccttctattgcggcaattaacgacacggaaaaacaagctgccgtgttcactgaaacaaatgatcattacgaacttcaatttgcagataaaaaacttatcgtttcaaaaaatcctttccaaattataatgaagcaagctggaaaaaccattttccaaacagaaggactggcaattaatcgtgataaagaacaccaaatttctatccaaagtaagcctggaaccgcgatttttgggctgggtgaaaaaacaggagcgttaaataaagctggttccattattagcatgtggaatacagacgtatacagtccgcataataaagatacagtggaactatatcaatccatcccatttatgattgcagatacggaggaaacaacgtacggcctgttttacgataattcacatcggacagaatttgattttcaaagttttgaagagatgtatacgattttagcagaaggcgggcaagcaaatttatacgttatctttggtgaagatgtcaaagaagttgtcgcaaactacacgaatttaacaggaaaaaccccacttccgccaaaatggtcattaggttatcatcaatcaagatatagctacacatcggaagaagaagtagagcgaattgccaacacttttaaagaaaaagaaattccgctagactgcgtatttatggatatacattatatggatgattttcgggtgttcacttttaacccggatacttttccaaatggaccagaactaattgcgcgtcttcgtgaacaaaacattgatgttgtgccaattgttgatccgggaattaaaaaagatgttaattattccgtatatcaagaagggatcaagcatcattatttctgccgtaaacttgaaggtgcgatttattatggtgatgtttggccaggtgtcagtgctttcccggatttcctaagtacgactgttcaacgctggtggggagatttgcatcagttttacacagacttaggcattcgcgggatttggaatgatatgaatgaaccctctgtatttaatgaaagtaaaacgatggatttagatgtcgtacacaatatggacgggaaaaatgtaacccataaagaagcgcataatttatacggattgtatatgagtaaagcgacttttgaaggattaaaacgccttgtgccaaacgagcgtccgttttcactcactcgtgctggttatgcgggagttcagcgttattcagcagtttggacgggggataatcgtagtcactgggagcatttagaaatgtcgctgccgatgattatgaatttaggtttatctggtgtcgcatttacaggtgcggatgttggtggattttcttctgactgtacgaaagaaatgctaatacgctggacacaagccggcgcgtttttaccatattttagaaaccattgcgtgcaagatagcatttatcaagaaccatgggcatttgggctagacgcggagaaaattgtgaagaaatatattgaaatgcgctacacctttttaccgtatatttatacagaattccaaaaaactgcggagaatggcttgccgatagttagaccactttatatggagtttaaagaggaacgcgatttaattcaagtgaacgatcaatttatgctaggtgaaaatatcctcgttgcgccaatcgttcgcgaaggccaagtgaagcgtttagttcgcttaccaaaagggacttggtttaattattggacgaaagagcaagtagaaggcggcgactatattatcgctgacgctccgattgacgttatgccaatttatattaaagcagggacgattttaccattaggtaccagcgttcaaaatacaaaagaagcacaagatttggcattagaaatatacttagataacgacgaggcaagcggatacgtgtataatgatgatggcaaaagctaccaatacgaaagcggaaaaatatccaaaacagctttcactgctactttcaaaaacggcgaagtacagataaatggtgaccatcacggcgaagaaaacttacaacaaaaagttactactatagaagttttcggtaaaaaaatagacaaaattacaagggcgggaatttaatcgatgaaagaaaaagactggtggaaaaaaagcgtagtttaccaaatctatccaaagagtttcaatgactcaaatggcgatggagtcggtgatattcaagggattattgagaaattagattatttaaaagagcttggcgtagacgttatctggctatctccggtgtatgattcgccgcaagatgacaatggatacgatattcgcgattaccaaaaaatttacgaagaatatggcgatatggcaacgtttgacaatctgttacaaggtttacatgatcgtgatatgaaactcgtaatggatttagttgttaaccacacttccgacgaacataaatggtttgaagaatctcggaaatccaaagacaacccttatcgtgattactatttctggcgtgaagaaaatgaaatcaacaactggggctcgattttcagtggtccagcatgggaattggacgagaaaacaggcgagtactacttacaccttttctctaaaaaacaaccagatttaaactgggaaaatcctaaattacgccaagatgtatataatatgatgaaattctggcttgataaaggtatcgatgggttccgcatggacgtaattaacttcatttccaaaaacacagctttcccagatggaccagttgcagaaggtcaaatttacggagatgcaggtaacgatttttgcaatggaccacgtattcatgagttcttgcaagagatgaaccaagaagtaacttccaaatatgatgtaatgactgttggcgaaatgccaggtgctagcacaactgacgcgcaaatttatacaaatccagcaaataatgaagtggatatgatttttacatttgaacatatgaacctagactccgatggtgataacaaatgggatctaaaaccaatttatttaccagatttaaaagaaaatatgtccgagtggcaagtagcgcttcaagaaaacggctggaacagtttatattggaacaatcatgaccaaccacgtattgtttctcgttttgggaatgataatcgtttccgcgttcgttcggcgaaaatgcttgcaacatgtctgcacatgatgaaaggaacaccgtacatttatcaaggtgaagaaatcgggatgactaatgttcattttgaaacgctggaagaatatcgagatatagaaacattaaacatgtataaagaacgtaaagagcaaggacacagccacgaaagcattatgcagtctatttacactaaaggacgcgacaacgcaagaacaccataccagtgggataatagcgaaaatgctggcttcacaaccggaacgccgtggcttaaagttaacccgcgttatacagaaatcaacaacgaagaagcgctgaaaaatccagattcgattttctactactaccaaaacctaattaagttacgcaaaacaacagaaatcatcacaactggtaattatcgcctgttgttaccaaaagatgaagcgattttcgcatatgaacgttatacagaaaatgaaaaattagtcgttttatgtaatttcacagaagaagagcaagttcttaccgatgaaaatattttaaacgacatcaaaaaaggctccgtacttgcaaataatgttcctgatattatagaaggaactttacgaccatacgaagcgatagtttatcaaattaaataaacagaccagaaaagccacttgcgttttaagtggctttttttgtttgcatcaaaaattatagtataatagaaggaaatgattttattaggaggaattctcgtgctatttgatacgcatgtacacctcaatgacgaggcttttgatgatgatatagaagaagtaataaaacgcgcaaaagaaaacgacgtgacccgtatggccgttgtaggctttaataaagaaacaattgaccgggcacttaaattagccgataaatatgattttatctatctaatcgtcggctggcatcctacagacgctattaccttcacagacgaagatttagaatggttacgcgatttagcccttacacacccgaaagtagttgctttgggcgaaatgggcttggattatcactgggatacttcaccaaaagaaacccaatttgaagtttttagaaagcaaatacgtttagctaaagaagtgaatttaccgatagtcattcataaccgcgaagccacagaagatgtagttcgcattttgcaagaagaacatgccgaagaaataggcggaattatgcattgttttggcgaaacagtcgaagtaatggaagcatgtttagcaatgaatttttatatttcattcggcggaacagtcacttttaaaaacgcaaaattacctaaaattgcagcccaagctataccaattgaccgtttattaatagaaactgacgccccgtatctcgctccaactccaaatcgtggaaaaagaaatgaaccaggatacgtcaagttagttgccgaaaaaatcgcggaactgaaagaaatgaaatatagcgaaatcgccacgcactcaacagataacgcgaaaaggctttttaaaattaaagactgattgtaatataactgtaatataaggccgagtctgtaacccaatcttaagcttctagaagataaaaatcactacttggacaaaaacccttatttcatgcctacgaccagagacgtagaaaaatgacacatttctgttacatttgacactttttaaaaattttatatttgaaaatggctttataccaacgtttatgctttaagtttgcgaaggtgtgaacaaactatagaaaaaattgacagttctttagtcccctgtatataatcactagcgaagtagaaaggggagaaatacatgaccatggaaaacagcagtaacgtagcccaatcatcaaaatggaaattaccaatcatgattgcaggatttgttattgtagtagcattggttttttatttcgttttcgaaggaactaaaaacgatatcactatagtaaacgctggtgaaaaaattgaatcaagaacacatgctaaaacagtttctgaagcattagatgaagcaggaattaaagtaagtgcacaagatgaaatcgcgccaggaaaaaatgcggaaattaaagacggtatggaaattaaatatcttccagctcgtcaagttacaataaatgataatggtacaaagaaaaacgtttggagcacaaaaacaaacgtagcagacttgcttaaagacgaaaatattactactcgtccacaagatgttttaaatgttgcattagatactaaattaaaaaatggcctagaggttaacattaaccgtgccattgaactttccttacaaaacggaactaaaaaagatacagtatggacaactaagaaaaaagttagtgatttactaacagagaaaaacatcaaacttgataaagatgaccgcgtgtcacctgctaaagacagtaacttaaaggaaaaaatgaccgtacaagttacatacgtcaattcaaaagcagaaaagaaaaatgaacaaatcaaatttgaaacagtttataaagaagacgatagcctaaataaaggcgttgaaaaagtcgttcaagaaggtaaaaatggcgaaaaagttgtcgagtataatgtaacttttgaaaatgacaaagaaacaaaacgcgatgtcattaaagaaaacgttacttctgaaaagacagataaagtagttgtacgtggcacaaaagaaaaagcgaaagtatcacaaatcgcaaatgcttcatcttcaaaagcaaccacttctaacgcttcatcagctccatcaggtggtaaaacttatcgtatggaatcaacagcatattcaggtggcggtatgacagcttatggtattaacctaagtgctaatcctggaatgaaagtaatcgcagttgatccaaacgttatcccactaggttctaaagtatgggttgaaggttacggcgaagcaatcgctggagacactggcggcgttatcaaaggaaatatcgttgacgtttatttcccaaatgaaagccaatgctactcatggggtagaagaatggttactgtaaaagtgttaaactaatttcgtataaaaacgaggctgactcatagggcctcgttttttctttgcccaaaatgtggtatgatgtatttacttattttataaaaaaggatgttatcaatatgagcgggaagcctgtaatacatgagtttattgttgtagaaggacgtgacgatacaactgcaatcaatcgttcagttattgcagatactatcgaaaccaatggctcagcactttcacaagaaacaattgaaaagattagacacgctcaagaactgcggggagtcattatttttacggatccagatttcccaggcgaaaaaattagaaaacaaattgattctgcggtaccaggatgtaaacatgcatttattaatcggcaagacgctctaccaaaagcaggacgtggactcggtgtagaacatgcgagcagcgcccatattagagaagctttagagcactttcatacaagcagcgtaccaactgaaaaacaatatatctccaaagaaaccctgattcacttaggccttctaggtggaacaggagcaaaagaacgtagagaaaaactcggcaacattttaaaaatcggctatacgaatggaaaacaattgcaaacaaggttggaatcatttgccattagtgaagaacgattagtagccgcgtgccaaacgattatgcaggaggaagaaaatgagtaaagatattgcaactcccggaagaactacggaaattttaaaaaaatatggtttcttatttaaaaaaagtctcggtcaaaattttctcatcgatagcaatattttgacacggattaccgatacagctgaaattacgaaagaaacgaatgtcatcgaaatcggaccaggaatcggcgctctaactgagcagttggccaaaacagcaaatgaagtcgttgcgttcgaaattgatcaacgtttgttaccgattctggatgacacacttagtaactacgataatgtgcgcgttgtccataatgatgtgctcaaagccgatgttgctgaagtgatcactgaacaatttgcgaaacctgaactgcctcttaagattgtggcaaacctgccttattatgtaactaccccgattattttgaaattacttcatgataatatcccagcagactcaatgacttttatgttgcaaaaagaagttgctgaccgaattagcgcagttccaagcacaaagagttacggtagcttaaccattgctatccaattttacatggaagcagaactagcatttattgttccaaaaactgtctttatgccgcaacctaatgtcgattctgccgttattcatctaaaacgccgtaaagaaccattagcaaaagtaaacgacgaagagtttttctttgaagtaacaagagcatcttttgctcaaagaagaaaaacgctatggaataatttagcatccaagttcccggccttaaaaccgcgtaaagaagagttgatagaaggtttaaatgcaattggtatagacttaattagacgcggagaaacgcttgatataccagaattcgctaaattaagtaactttcttgctgatttcctcgcagaaaaataatttttttcaaaaagagcgctttcttagttgacagctagcccttccaactgttaaaatatttggttattgatttcgaagcccatctgtgctataattgatattagtgaggtggaaaataaatgccaaaaaccattgcaagcattaagacgaatttagattctagattaggtaaagcattgacattgaaagcaaacggcggtcgtaagaaaacgattgaacgttgcggtatcctagctgaaacatatccatccgttttcattgtggagcttgatcaagatgaaaacaactttgaaagagtatcctatagttatacggatatcttaacagacgcagtagaacttgtatttacagatgataataaagaattagctttataatgaagctgaagtaaccgaaccgtttagtatggttcggtttttgctttacatagaaacccttttggaccgctagctacatattttttctttcatatgatagaatagaaaaagagattttgaacgcggaggccaagaaaaatgaaaataagcataacagcaccagctaaaattaatctttcgcttgatgcgctatacaaacgtgaagatggctatcatgaagtggaaatggtgatgacaacaatagatcttgctgacagattattcttagaacgcttagacgaggataagattgtgctagatgtaaaagcgcattttattccggaagatcgtcgtaatttgatttatcaagcggctctcctcttaaaaaatcgttttaacataaaaatgggagtgcgcatcacaattgataagcacattccagtttcagcgggattagctggtgggagttcggatgctgctgctgcgctcaaaggtttaaatatcatttgggagctcggtctttcgatagaagaattagcagaaataagttccgaaatcggctctgacatagctttttgcgtatatggtggaactgctcttgcgactggacgtggagaaaaaatctctgcattgcctaatatgcctggttgttggatagtactagctaaacctagcattagcgtgtcgacaccaacgatttataaagaattacaagtagataatgtagaacaccctaacacagaaaaaatgattgaatctatcaaaaatggtgatttagacggaatttttgcttcaacaggaaacgtattagagtctgtaacgctagaaaaaaatccacaagttaagcgaattaaggaccggatgttagcatttggtgctgaggcggctctaatgagtggtagcggcccgacagtgtttgcgctcatcaaacagtattcaagagcgaaacgtgtctataatggcttgcgtggcttttgtgaggaagtttatatggttagaccgtggagtgaaagcgaaaacgatacgattaattaatggatgagaggggtcagacaaatgaaaattatttttaatgcagatgactttggaattagcccaggagcagtttatggtattttagaatcgtatagacgaggtgttgtaaaatcaactacacttcttgctaacagcccggcttttgatttggctgtagaagtagcgaaagaaaatcctggactggatattggtgctcatttgacccttacattcggttatccgttacttcaagggttagaaacattaacggacgataacgggcgtttccgcaaaaactatacggcgcttgagtctggtttagctaacgtggatatggaagaagtggagcgcgaattaacagcacaaattgagaagattttgggcgcaggaatcactatttcgcactttgatacacatcattccatcgaaccgttaatttatccagttcaacataagttggcagaaaaatatggtgtaagtattagacgtcattcagatgtttctgattttggcgccattaaaacaccagatttattcgatacatctttctatgcagatggcgtatcttttgaaacaattaaaaaaatagtacaagagcatatcggaacaaacgatgtcgtggaagtgatgactcatccagcgtatatcgatgaaacgctgcgagaaatatccagttatgtagagccgcgcatcaaagaagtttccattctaacttcaagagaattacaagcatatttaggccaacaagaagtagaaattattagtttccgtgatttataaaagcattggcctgtcaaaggatgtttatttgacaggctttttaatactttaaaagaataaaagttgtcaattttatagaaaacgttttataatagagaaaatacggacaaaatacgtgaaatagctttttaatatacggaattttatcaaagggagagagattatgaagattcgtcgcagtgaacgattaattgatatgacgcagtttctattatcgcatccgcgaaagttagtgccgcttacgatgtttgctgaacgttatggctcagctaagtcttctattagtgaagatttggttatcataaagaaaacatttgaagatagagggattgggacacttgaaactgttccgggtgctgctggtggagtacagtatatttcaatagcgggaaatgacgatgtgcttgattttgtacatacgttgtgtaaccgaatcgcggaacctaaccgtctacttccaggagggtatttgtacctttcagacctacttggggagccagtgacgcttaaagcaattggtaaaattttagctaccaaatttaacaatcaaaaaatagatgcaattatgactgtggcaacaaaagggattcctattgcacaagctgttgctgagcatttgagtgtacctttcgttatcgtgcgccgagatagtaaggttactgaaggttctacagtgagcattaactatgtttcaggctcatctaaacgaatcgaaaaaatggaactatccaaacgaagcttagcagaaggatctaacgtagtaatcgtggatgactttatgaaagctggcggtacgattaatgggatgaagaatttactagaagaattcaatgcgcatttagtaggtattggcgttctagttgaatctgaatatgcagaggaacgtttagtcgatgattacgtttcacttgtcaaaattaaaaacgtcaacatgaaagaaaaacaaattgaagtagttgacggaaattactttaataactaattgataaaccctagaagaattttctagggttttttattttcgttaagtgatactaaaaacaaatcagacttgcgatgtacttcactcagttaacttttgtggtagaatgaaacctatcattgctacataaaatacagggcttctattcataagaagcagaaggagaacattcatgaaaaaatgggttaaatggttaattgttatcgtaattatcgcagtggttgccgcgggtgcggttttcttgctgtcaaaaaatagcggttccgtaacacaagaaaaattagttacagccaaagtgaaacaaggggatatgaaaatcaacgctacaggaacaggtgcgatttcgccgcaaaacacacaagttccagattatgatgagcttcaactagtagcgcaaatggatgaactggatattcctaacatcaagaaagaccaagaagttaaaatcacagtaacagcacttcctgacaaaacatacacaggaaaagtaaaagaaattgcagaacaaggtcaagtccaaaatggcgtgtctagtttctctgtgattatttctcttgataaaacagacgatttgaaggccggtatgactgctgatgcctcaattttagtaaaagagaaaaaagatgcactttacgtaccgattgaagctgttcaaaaagacagcgatgataaatattatgtactagttccagaagaacaagaaaatggcaaaacgaaaaaagtgaagaaatttgtagaaactggtcttcacaacgaagataatatcgaaatcactaacggcgttaaaaaagaccaaaaagtaatccttcctacacaagaaacttccacagttccaggtgctcctagctaagttttttgtatatacgtattagataaatagtatgaaggagggataaacatgccaaaaccgctaattgacatgaaaaatttaacgaaaacatatacactaggcggagaaacgtttaaagcattagacgatgttacttttaccgttgaaaaaggtgagtttttatccatcgttggtccatctggatccggtaaatcaactttaatgaatatgattggttgtttggatgttccagatgaaggcagctatcaccttgataatgtagatgtatttaaattaagtgacaacaaattatccgaaattagaaataagaaaatcggtttcatttttcagcagtttaacttgcttcctaaattatctgcttttgaaaatatagaattacctttaatttatgctgggctaagtgtttcagcacgcgaaaaagctgcaatcgaatgcttagaaaaagttggtttactagaaaaacgaaaaaacttaccaactcaactatcaggcggacagcaacaacgtgtagctattgcgcgcgcacttgccggtaatccacaaattcttttagcagatgagccaacaggagctcttgattcaaaaacaggtaaagaagtaatgggtatcttacaggaattaaacaaagcgggaaataccattgtaatgattacccatgatccaaccatcgcttcttacggaacaagaagtattcgtattcaagatggtaagctattccacgaggaggcgaaaaaagcatgaacgttctccaaagtatgaaaatggcgtggaaacaattaaaagcaagtaaacttagatcatttttaacgatgttgggtattattattggggttgcatctgttattctgttagtctcgctaggtaatggtgtaacgaaagaagtagacgaccaaatgggcgatttaggctccaatttaatcacagtagttaatagttcggtaaatccaaatgacaagtatacttatgatgaagtaatgaaatatcaaaatatcgatggcgtaaaaagtgtatctccagagctatctggtcaagttaatgcaacatacgattataaaagttcaagcaataaagtcattgggacgaatgaccagtacaaagcggctcgtagcttagaaatgaaagaggggcgcttcctattaccgattgatacggaatatggccagaaagtagctgtaataggctctacggtagccagtgatctatttggtttcggtaatccaatcggtgaaacaattagattgaatggcatgccttacaaagtagttggcgttcttaaagaaaaaggcgcttctatgatgggctcgagtgacgaccaaatctttatcccgatttcttcggctcaacgattactaaaagatacaaatgtccgtactatctacgtagaaacaaaatctgctgaagatgttgattttgtagtaaatacattagaatctcgcctcgctattaagtttggcaatgaaaaagaacaagaagaaaatgcttcttctgctcaaatgggaccatcttatcaagtcattaatcaacaagaaattcttaacgcgttcaatacaattagcactacgttaactactgcgcttggtgcaattgcggccatttcgcttgtagtaggtgggattggaattatgaatattatgcttgtttctgttagtgaaagaacgagagaaataggtataagaaaagcgttaggagctaaaaaacgagcaattctgctacaattcctaatagaatctattgttattagtgtttgcggcgggattattggaattcttatcggcgtttcaggcgcattgatattcggctcagttgctggcatatcgtcaggaataacagctggaaccattatcttctcgtttgtgttctccttatgcatcggcgtaatatttggtatcgcccctgcgaataaagcatctaaattaagaccaatcgacgctttaagatcagagtaacgaaaaaagaaatccggaattgtgtatttcggatttctttttttaactaaaattagtgctttaagttgtcttgtcatctatatttaatgtttttgtcacaattaagcgttttcaaatcggggtttagttcttttttttactagaaaaaagaaaaaagttcttgaatcatgcattagaataggattttcagggtatacactatttattgacttattcagatgagatgaatagagacatctaaaattgtaaatatatgatctcagaaaaatcataaattctctgtaaattgtatacaattatttttgagaaatcataattttaacaccattttactagcgttcttgcccataaaatagtatgatgattacatcttgatactgtgctagcaatggtttcggcgtttttgttactttagtgataaaaattgtatacaaaacaaaaacttgaagaaacaatctgaaaatgtcaatgattttcaaagaaaaactattttttttggtttacaattcacaaagttgtcaaatttagttttttttattattatgttcatagggaagaattttacgttaatattgcttgcttataaaagtgattttttctatgggggaatttttctcgagtgtgtacttatgttgcatgtgagcattgtttactagcagcgcaactagaataaggtggtgaagataatggagattacagatgtgagattacgacgtgttgagacagatgggagaatgaaagctatttcttcaattacgattgatggtgagtttgttattcacgacattcgtgtcatcgatggcaacgagggtttattcgtagctatgcctagtaaacgtacgccggatggtgagtttagagatattgctcatccgattaactcaggcacccgtgcaaaaattcaagaagccgttttagctgcttatgaagtagcggacgagccagcagtaaacgaagaaagttctgcagacgaaagtgttgtagaagaaaactaaaaaatcctcggttaggaagaacgttgttgggaacagctgggggatacttacctgagattttagctgggataagcagattctttttgagagaggcaaatgggataaggagtgactaataatgcaagtaacagatgtgagattacgtcgtgtagaaactgatggaagaatgagagcgattgcttcaatcactttagatgaggaatttgtagttcatgatattcgcgttattgatgggaataacggattattcgtagctatgccaagtaaacgtggtgttgacggtgaattccgtgacatcgctcacccaattaattccgatactcgtgcaaaaattcaagaagttgttttagctgaatatgagcgcgttggtgaagaagaagcaactgcggtaacagaagaagaatctgaatccgtttctgctgaataattaaaaaaatttccaagggctagcttagtgctagccctttttgtgtagaataactatgaaaaaaatcataaatagccttggtcttctattttggctatggtataattaaaagcagattgtaaaaacagggaggagattttaagtgatgttgcaaaaacagatgtattcaagcaaacatttttgtagcacaagtgtaaaatcctcttttagtaagcaaataaataaccacactgtatctttcggaattttcaaacaaataaaactttaaatttcctctttacctaaaaaacgtaggtaggggtttttatttgggcgcattcttgaaaaaaagcaaattttacgttatcattcatagtggatgaatagtgaatattggaggttctatataatgtcaaaacgatatgctgtagtgcttgctgctggccaaggcacacggatgaaatcaaaattatacaaagtattacatcctgtttgtggaaaaccaatggtcgaacatgtagtagaccaaatttcgacacttgatgttgataaagtggttacaattgtaggtcatggtgctgagaaagtgcaagagcatttagcaggtaagagcgaattcgtgaaacaagatgaacaacttggaacggcgcatgcagtacttcaagcgaaatcagaacttgcaggaaaagatggtgtgacgttagttgtttgtggagatacacctttaatcgaagctagcacaatggaagctttattaaaatatcaccatgaaaaaagagcaaaagcaactattcttacaaccgttattgaagaccctacaggatacggacgtattatccgtgatgatcttggtattgtcgaaaaaatcgttgaacataaagatgcgacagaaaaagaacaacgcatttcagaaattaacaccggcacatattgctttgataataaagctctttttgaagctttggaaaatgtctctaatgataatgtgcaaggcgaatattacttaccagatgttattaaaattttaaaagatgcggacgaagttgttgcagcttacaaaatggagtccttcgaagagtcacttggagtaaatgatcgaattgctttagctgaagcttccaaattaatgcaacgtcgaatcaatgagaatcatatgcgtaatggagtaacacttgttaatccggaaaacacgtatattgatatagatgtaaaaataggtcaagatacagttattgagccaggagtaatgcttcgtggcaagactgtaattggtgatgattgcgtggtaacgagcggttcagaaatcgtaagtagtgtaatcggtgaacgcgtgcacgtcagaaattcctcgatttttgaaagtaaagtcggtgatgacgttcaaatcggaccatacgctcacttgagaccagaatctgatattcataatcatgtgaaaatcggaaattacgtcgaaaccaaaaaagcagttgtcggtgaaggaactaaattacctcatttcatttacatgggagatgcggaaattggtaaaaacgtcaatgttggttgcggaagtattgctgttaattacgatggcaaaaataaagcaaaaaccatcattggtgataatgtctttgttggatgtaattcgaatttgattgcacctgtcaaagtgggagatcgtgctttcatagcagcgggctccacaattacaaaagatgttcctgaagatgcgttaggtattgctcgcgcgaaacaagataacaaacttggctacgcgaaacatttgaatcacggtaaataatttcctattggaaagtttaaaattttaataaaaaatagtggaggctgattatgtcaaacgagtattttgatccaaagttgaagattttctcgctaaattctaatcgtgaactagctgaagagattgcgaaagaagtaggtattgagttagggaaatcaagcgttactcattttagtgatggagaaatccaaattaacattgaagaaagtatccgtggttgtcatgtatatgttattcaatcaacgagtaatcctgtaaaccagaatttaatggaacttttgatcatgattgatgcgttgaaacgcgcttccgcagcaacaattaatattgttatgccttactatggttatgcacgtcaagaccgtaaagcaagaagtcgtgaaccaatcacagcgaaattagtagcaaacttaatcgaaactgctggtgcaactagaatgattacacttgatatgcatgcaccgcaaatccaaggtttctttgatattccaattgaccatttgaatgcagttcgccttctaagtgactatttcagcgaacgtcatttaggtgatgatttagttgtagtttcacctgaccacggcggggttacacgtgctcgtaaaatggctgaccgtttgaaagcgccgattgctatcattgataagcgtcgtccgcgtccaaacgtagctgaagtaatgaacatcgttggaaatgttgaaggaaaagtttgtattatcattgacgacattatcgacacagctggaacaatcacgcttgctgcaaaagcattacgtgaagctggcgcgacaaaagtatacgcatgttgttcgcacccagttctttctggcccagcaatgaaacgtattgaagattcaccaatcgaaaaactagttgtaacaaactccatcgctcttccagaagaaaaatggatcgataaaatggagcaactttctgtagcagctcttcttggtgaagcgatcgttcgcgttcatgaaaatgcttctgtaagttctttatttgaataaaatttaaaactaaaaaggatttttctgtgattattcatagagaaatccttttttaatttaaaatcgtgtttttgattaaaccagttaataatcaagacgggaaatatacactttatataaaatctcccttttgaaagtctatttttatctttgctttaaatgagggtgtgataactttaattcgggataaatggttggggaaagcaggagttagagcagttttgaactcgttgtttgagatgattattacaaattttgcacaggagatttggtggataaagttcacagaatgtctattgtaatggctctgtttgttaggtactcttaaatagtacaaaagactaattaggaggaacagctatgaaattgctaaaaaagggaacaacagttttatttgtaatgattatggcagttatgttagtagcatgtggggataaggaagaaagtaagaccttttcactttctcaaaatggtgtggattcgaaattaacttacacttataaaggggacaaagttactaagcaaactgctgaaaacacaatgttatatacttcaatgggcattaaaacaaaagaagaagcagaaaaaatgcttaaagaaacaagtgagaaattccaaaacattgaaggattgaaagaaagcattgaatataaagatgacaaagctattgaaacattagaagtagattacacgaaaatatcttctgaagaccttaagaaattacctggtatggcatcaaccggagatgtgtctaaagggattagtatgaaagaatctgaaaaaatgttgaaatctcaaggctttaaagaagtcgaaaaataagctagtagtaaaaaagaagtatccgaccagtcggatacttctttttgcttaataatcttgcgcttcaataacaacggcagtaccggaagcagtaaccattaacatgccattatctgcaccgagcacttcataatcaatgtcaacaccaataacggcatttgcaccaatatctttcgcgcgttgttccatttcgcgaattgcttcctcgcgagcgttaataagttcatcttcatagccttgcgaacggcccccgaagaaatttctaagtccggctccgatgtctttcataaaattaacaccagtaatgacttcgccgaaaacgatttttttatactcgataatttgtttgccttcaatatttggtgaggttgttacaatcatggttttatccctccagttttcttttatcatacctcttagtactttttctagtcaaaggatatctgcttaatttacccgatttcgcgctttttcaatataagaaattgcatctggaactttacaagaagtttttcctaggtttacgtgaacttttccaactgattttgcggcttcaattgctttttcatgcaaatcgtctttgtaaattccgcaagtgataataaagccgttcattgaatagcgagttctatttgattcggattgtaatgtttctttcgcgcgttggagtaatgcctctgcttcaggcaagttgttaatatgctcgctataaatctgccagcccatggatttagttaaatcatactcgctctcaatccacttctttgcaaaaaggagtgcatcatcacgtttgcttacgatcgatgctagtccaaaggtgagttgtgaccatgtttcgcgaaaagctacattccatttttcgatttgctcggtagttactttgtttggattgaccgcaagtaaaccaagataaattaagtcgctgttatttgattcgattagctctacggccagttcatggtttttagttaatttttcacggcggataattttctttaagtctccaatttttagtccgtaaagatctaatgaatccgggcaaccgtgattacgaaaaattttaatcgtattggggttttctaaggcttgtagctcggtgtcaagttggtcaaaagtaatcatacgcgtcactcctctcgaataaattaagtataacaaaaaagcatgcaaaatcgcatgcttttaggaattaagaatattagtcgatttgtttcattgcatcgtctagaacttttttaagtgtatccgcggagtttttcatttgttctttttctttgtcgtttaagttcatttcgacaatgtggcgaactccttggcggttaactactgctggtgcgccgatgtaaatatcattcataccatagtggccatctaaataaacggaaagtggtaaaatcgcattttcgttatttaggatcgcttttgtaatacgagcaagagccgcagcaacgccgtagaatgtagcgccttttttattgataatttcataagctgcatcacgaacgcttacgaaaatagtatccattgcaccttgttcgtcttcgttaatccattcagtgattggaaggccaccaactgttgtatggctccatgctgggaattgtgtgtcgccgtgttcgccgaggatataaccatggacgttacgagcatccacttttaagtaatcggcaatcgacatacggaaacgtgctgtatcaaggcttgttccagaaccgataacgcgttcttttggaagacctgagaatttccatgtagcgtaagttaagatgtctactgggttagaagcgattaagaagataccgtcaaatccgctcgccataacttcatccacaatgcctttcatgattttgatattgcggtttactaggtctaaacgagtttcaccaggtttttgtgcagtcccagcagtgacaacaactaagtctgcatcgtggcagtcgctataatttgctgagtagattttcttcggtgtggaaaatggaacggcgtggcttaaatccattgcatccccgattgttctgtctttatctatgtcaataatgccgaattcttgtccgatacttaagtttacacaagcaaatgcataactagaaccaactgctccgtcgccaactaaaataattttttgatgatctttcatttcgaattcctcctataaaaaatctatttactagtacagtataacatgaatttttcatttgtgaagcattgaacgtcctgaatttaaaaaagttgttataataaatttatgaaaacgctatagtacagtttgaaagcgtctgcattaggagcggttcgctattttctgtttaccttttattgagaattataaaccttttaaagagaaataaggcttttgctttgttttgctatttttctaaagggtagatataatatagatgtaccaaaattgaatgagtggagtgattttttatggcaacaacattagaggtccagaaaagagaaacaacgcaacattcagaagtaacgagattgcgtagtgaaggaaaagtgcctggaattatttatggttacaaatcggaaaatgttccagtttccgttgattctttggaattaatcaaagcagttcgtgacaatggtcgaaacgccgtattttcagttactgtagacggcaagaaattaaacgttttattacatgaatatcaagtggatccgttaaaagacgtattagtgcacgttgatttactagctgttgatatgaatgaagaagttgagactgatgttcgcgtggtattagttggtgatgctccaggcgttaaagctggcggtgtacttcaacaaattatccatgatgtaaaagtttcagcaacaccagaaaaattaccagaaacaattgaattagacatttcttcattagaaatcggtgatgttttaactacaaacgaccttcctgaaaacaaagattatgtcgtgcaagcagaggaagaagaaacagttgttaccgtttctgctccacgtgctgaagaagaaccaacgactacggaagcaccagaaccagaagctgtacatggtaatgatgaagaaccagttgaataattttttataaataaggatggaagattcgcatttgtttgcgatatcttccatttttttttgttataatagctgtatgaaggaggcggtttcatgcttgataaatcagtaccacatatttctgttgcaatggtaaatcatagtgctaccaaatatcctgagttcagtttgccagaaggttattcgtttcgtttttatagagatgggatggaggaagactggtgcagattgcaactagaaactggccaagttccatcgatggaaagtattcggatgcgttttaatacagaatttggaaatgaaaaagaaaaattagccaagcgttgtgtctttgtagaagccccagacggcgaaattatcgggaccgcaatgctttgggatggaaatacatttggcgagatggcaagccgcattcattgggtcgctgtactcgactcgcacggcggaaaaggtatcgccaaagccttgttatctaaaattctcggcttaaacaaaagtgatttcgtctatctaacaacgcagacaggaagttaccaagctatttatctttatcaaaaatttggctttgaaaaattcgtggatgaaactcctgaaaattggaaaacagaaaactttcaagcagaaaacgaaaaagcttggcaaataattgaaaataaaattgcggaatacaaggcttagttggaaaactttcaaccaatggaaatccgtgttataatcaaaaaaacatcgaaacaaaaaccagttcattcgtgaagtggtttagttcatgtaaggagaagcttttatgaaattaatcgcaggactcggaaatccgggcaaaaaatatgaacgtacccggcataatgtcggttttatggtagtagatgagctgagttttcgccatcaaaccccttggaaaaaatcaaaatttaacggtatggtaagtgaaattaatgtgggcggcgagaaaatgattctagttaaaccactgactttcatgaacgcttctggtgagtgcattcgtccgctaatggattactacaatatccagatagaagacgttctaattgtatatgatgacttagatttaccagttgggaaaatcagattgcgccaaaaaggtagcgcaggtggtcataatgggatgaaatcaattattcaacacgttaagacgcaagagtttaatcgtatccgtgtgggtgtcagtcgtcctttaaaaggggaagtcatccattacgtattaggagattttccaaaagcggaacaacctgatattatcgcagcaattcaaaaaagcgcagatgctattgaagattttgcgcaaacaccatttattgaagtaatgaataagtataattaaaaaatagactatccgagaggcgtggcaatgcttttgccacgtatttcggtctttcttctagcgtgtgatttaatcttgcattgcatagaatgaattttctgacaaaaaaggagctgttttcccttgaaaggattacaacaattaatatatgaacaaaaagatattcgcgcggtcttaaacgcgcttgatgaaaaagaaaaatcacaacttgtcacagggctgacaggttcttcgcgcgcgctttttgcgagtgtggtggaaggcgcatcaaagcgaccagttgtgtttgtaacgcataatttgtaccatgcgcaaaaattatacgacgatttactttctttaatagatgtggatagattgtttttatatccagcagatgaattaatttcttcagagttaagtatttctagtccagaattgcgtggtcaacgtgttgaggcgctcgacttcttattatctggcaaaccaggaattgtaattgttccagttgcagggcttagaaaaatgcttccacctgtctcgttatggaaacattttaatatatctatcgttgaaggcgaagaaatcgatccagatgtattgcgccaaaaattagtcactatgggttacacgatgagtggaatggtgaacaccccaggagaattcagtgtccgcgggggcatcattgatatttatccgattacagaagaatttccgattagaatagaacttttcgataccgaagtggattctcttcgtttctttgatgtggagacacagcgttcgacaacacgtgttgaagaattccgtttgcttcccgcgacagaaatcatcttagatcaaagctattatcctgacattgttacccgtttagaaaagaaaatgacgcttacgttaaatgaactaaaagaaaacgaagataaacaagcactcgttgaaaatttagaagaagatttagaaatgttgcgttctggcgtaaaaccagacatgttctttaaatatattggtttagcttatccagatccagcttcacttttcgattatttgccaaaaaacactgctatattactcgatgaatttgcgcggattttagaaaccgaagaaagtttggagcgggaagaagctgagtggcagaccgaaacattaagtcgcatggaaacagttcgcgacgttcaagtaagccattcattcaaaaaattattagatgaaaaccattcgcccaaaatatacttaacgcttttccaaaaacaaatggcaagtatgcgcgtgtcaaaaacgaccaatatcgtttataaacaaatgcagcaatttcatggccaaatgaatgttttaaaaacagaaatagaaagttggcataaaaataattatgccgtagttattttagcgccgaacttagaacgtgccgaaaaaatgcaacaaactttagcggattacgatatggaaagcacgattttgaaaaaagaatcggatgtaccaaaatatggtatggttcaatttgtcatcggaacgttccaaaacggttttgaacttccgcttgcaaaagtagccattattagtgaaactgaactttttaataaaaaaatcaaaaaggtgaaaaaacgtcaaaaactttctaatgcagaacgaatacaaagttattctgaattaaaagttggcgactatgtggttcacgttaatcatggtatcgcccgttatgtcgggatggaaacactagatattaacggcgtgcacaaagattatttgctgctagtttaccaaggtgaggataaacttttcattccagtagatcaacttgatttagttcaaaaatatgttggtgcagaagggaaatccccaaggttaaacaaactaggtggtgctgaatggaagcgtgtgaagaagaaagtacaagcttccgtccaagatattgccgacgatttaatcaaattatatgccgaacgagaagctgaaaaaggttatgcatttagtgcggatgacgaaatgcagcgcgaatttgaagaagcctttccgtaccaagaaactgacgaccaattgcgctcgatttcagaaatcaaaaaagacatggaacgtccgcgcccaatggatcgacttttggtgggggatgttggttacgggaaaaccgaagtggctttaagagctgctttcaaagcaattatggatggcaagcaagttgcgttcttagtcccaacgactattttggcgcaacaacattatgaaacaatgaaagaaaggttccaaggtttcccaatcgaaatcggacttttaagccgtttccgtacgaaaaaacaacaaacagagacgttaaaaggaatgaaaaatggcacagttgatattgtggtcggaacgcaccgcctattatcaaaagacgttgagtatcaagatttaggcttgcttgtagtcgacgaagaacaacgatttggcgtaactcacaaagaaaaaatcaaacaaatgcgatcaaaaatagatgtgctaactcttactgcaacaccaattccgagaacacttcacatgtctatgctcggcgttcgtgacttatctgttatcgaaacgcctccagcgaaccgttttccagttcaaacatacgtagcagagcaaaataacgttttagttcgcgaggcaattgaacgtgagttggcgcgggatggacaagtttattatctttacaaccgtgttgaatcaattacgcaaaaagctgatgaaatttctgcaatggttccggatgcacgtgttgcaacggctcatggtcaaatgggtgaatcggaattagaatcagttattttaagtttccttgaaggagaattcgatgtcctcgtcacgacaactattattgaaaccggagtagatattccgaacgttaatacgcttttcgtgcaagatgctgatcgtatgggactatcacaactgtaccaattgcgcggacgggtaggacgctggaacagaatcgcatatgcttactttatgtatcaaaaagataaaattttgcgtgaggaagctgaaaaacgcttatcagccattaaagagtttaccgagttaggctctggatttaagattgcaatgcgcgacttatccattcgtggggctggaaatatccttggagcgcaacaacacggctttattgattcggtcggcttcgatctatactcgcaaatgctaaaagaagcaattgaagcgaaaaaaccgaaagaagaacaaaaacaaatcgttccagtcgaaatcgacattcaggcagatgcctatattccagaatattatattactgacgggcgccaaaaaattgagatgtacaaacggttccgaaatattgaatcattactcgacctggaagacttgcaaagcgacatgattgaccgttttggtgagtatccagaagaagttgaatatttatttacgatgacagaactcaaagtacatgcgcttgaagttggaattgaatcagttgaacaagaacaaaataaaattacgatgctattttcagaaagcggaacagctggaattcgcggagacatcgtcatgcaaattattggcgaatttggtcgtatggttggagtaggcatggaaggaacacagctgaaaatcacaataaatgtccaaaataaacctttaaaagaatggctatatcaagtgaaaagtttagcagaaaaacttcgtggagctatgaaagaacaagtatctaccgaaaagtagtgcattattaagaagaaaggaggtggcgggatgtcagaacgttccatgaagggactaatgaaaggagcggcttggctaaccgctgcctcgtttatctctaaattacttagtgcagtttaccgagtaccttttcaaaatatggtgggagatgttggattttatatttttcaacaagtatatccaatatatggaattgcgatgacacttgcgcttggaggcttcccggttgttatttctaaaatgctggcagaagcagagggcgatttaagaagacagcaaataattatgcgagctgtctcacggatgcttcgaattgtaagcatcgtgatttttgctttcttattcatctttgcaggtttaattgcaatcatgatgggcgatccagccctttctgagttaattcgcgttattagttttgtgtttttacttatgccacaactcgcgttcatgcgtggttttttccaaggtgagggagacatgataccaacagcaatttctcagaccgttgaacaaataattcgagtagcgatcattttaattggtgcaggacttgcgctcaatttagaacttaatctatatgacgcaggctcgatggcgatgagcggtgcattttttggcggggttgccggaatctttattttgcgccatttttataataaaaaagtcgcgcttggaggaggattacaacctgctgtatttgcaaataaagaagaaaaagtggggattggccgggcttttttacggcaaagtgtagcgatctgtgtggtcagttccatgctgattttatttcaattagtggattcttttcaagtttaccggttaatgagcgattcgggaattccggaatttatcgctaaatcactcaaaggtatatacgaccgcgggcagccaattttgcaattaggacttgtgttatcaacggggctcgctcttgcgcttgttccaatgattactgcggcaagggttcaaaatcaacaaaaagaactcaaacgctccattttattagcggttaaaattactttgattttgtcgggagcagaaactgttggattaatcgttattatgcgccctttaaatcaaatgctatttcaaacgccagatggaacctttgtcttacaattattcatgcccgccgttttcctaagttcattaattgtaatgctgagtagtattttacaaggcttcggaaaaatcatcgtgcccgcagttggtgttggaatcggtcttattgtaaaatggattacaggcagcatactaataccacgacttgcaactattggcgcgtcaatctcaacgtgtatcggcctactgatagtcctaatcatctgttacgtttcgttaaaacagaccattcgtgtaccatttgtagagaaaacaatgattttaagattagttgctgcgttagctttaatggcagtagttccgtgtttgttcgaatggttcgcaccgttaagtactagactcggaagtgcattccaagctataacaagtgctgctattggcggaagcgtttttcttgtttttgctctgaggtacaaattgctcggcccgaaagatttcgttttccttccgtttggctccaaattactcgcacttagtaagtttgttgcacggaaataataatataaagtaggtgaataaaatggcaacaactatgcgcttagataaatatttaaaagtttcaagattaattaaaagacgaacagtagcaaaagaagtagctgaaaaaggacgcatcgctgtcaatggagtaacagctaaaccaggaacaaatgtaaaatctggtgacgaacttgtgattcgctttggtccgaaaatcgttacagcaaaaattgaacgcttagaagaaaatgcaaagaaagaacaagcaacagaaatgtatacaattttaaaagaagaacgcacagacgaaagcagatagaaaaatcgtttgaaatcgcgcacgttagccgatttcaaacgattttttattgcgcataataaagtacaaacaattttttgcaaaaaagtcaagaaaaatatcataaaaaaagcggattccaatagacaaatgcctgatttattgatattattttaagcaagaaacgtttttttctctaccgaatttcacagataagagcaaataagaacatgggagggacgatgtatgaaaaaagccgaatcaaaagtagcgagaatagaaaaccgctatattaaagataccgcaacaatgaaaaaaactcgtaatcgtcgccgtattgccctgttccgtagacttgcttttatggccattatctttgcagtcgttggtggactactaactattacgtataccaaacaagttttagccctcaaagacaaaaaagaaaaacaagtgcaagtagataagaaaatggttgcaatgaaggatgaagaagaagcgctaaatgaccaaatcaaaaaacttcatgatgatgagtacatagccaaattagcaagaagtgaatattatttatccaaagatggagaaattatttttaatattcccgaagaaaattcgaaacaaaaagagtaagtcaaagccgagccgtcattctccatggtagaatcaaaggaaaatagagttgagtatttttggagtttgcgagtttgactgattgacactctttttattatagctataattaagcaatagagtgatattttaaggaggacgcatttttttatgtcgatcgaagtaggcaacaagttacaagggaaggttactggaattactaattttggagcatttgtggagctagaaggtggcaaaacaggtttagtccatattagtgaggtagcagataactatgttaaagacattaatgacatcttaactgtaggggatgaagttactgtcaaagtaatgaatattggtgatgatggcaagattggtctgtccattcgtaaagcagtagatcgtccggaccgcccagaaaaaagttatgatcgtaagccaaaatacagcaaaaaacctgctggaaactatgtgaaaccagccgagagctttgaagatataatgtctaaattcttgaaagatagtgatgaaagacttactactatcaaacgccaaacagaatctaaacgtggcggccgaggagcaaaacgcggctaaaacgctaaaaactaattgtaaagtatagaaggatgcaccgtattggatcataatacggtgcactttttgataaaatgtgagagccgaatttcgaaggaagggtttcttgaatggatgacaccaaaaaacgaatacataaatatatcgagaaacatgacttaatccgatccgatgataaattgcttgtggcagtttctggtgggccggattcttttgcgttgctccattttttatggtcagctaacttagttccaaaagaagctatcgccgttgctcatctaaatcaccatttacgagaaaatgcagaaaaagagcaactcgccgttcagactttttgcgaagagcgggatattccattttttatagaagaagtagatgtaaaaaaacgtgctgagaagctgcaaaaaggcattgaagaaacagcccgtattgtcagatatgacttctttgaaaaagtaatggccgagaacaatataaataaacttgtacttgcgcatcacgcggatgatcaaatcgagacaattctcatgaggttagttcgtggtagttctagcattggttggtcaggcatacaaccaaaacgtgaagtgagaggcggttatgccattcgccctttcttaccaattacaaaagctgaaatcatagaatacgcaaccaaacatgctttaccatatgaaatcgatgaatcaaataccagccaagaatacactagaaatcgttatcgtacacagctattgccctttctatctaaagaaaatcccgccgtttatgagcacttcaaaagattttccgaagaaacaagcgaagattttcagtttttagaagagttagcaagcaatttattaaagaaaaatctcattcaaaacggcaaacaatcaacacttttactcagtgactttaaaaatgaagcgaatcctttacaacgtcgcgcaattcatttactattgatgtatctgtacaatgatgatggccgtgttattacagtcaatcacatctaccagattatccagatgattcaaagcgaaaatccatcaagctctattgatttaccaaaaaaactcactgttataagatcatacaacgaactccattttcaatttggagaaagacatgctcctcctgagttttatcatcaattagaactaaatgaccgcattgaattagacaataaagcaagcatccgtttaaagttaaaaagttctgttgttcaaacaaatgggctaaatggaatgctactggatgcagaagacatcacacttccattaatcgtccgaaaccgtgtgaacggcgacaggatgacgatgaaaggacaagcaggtagtaaaaaactaaaagatattttcatcgatgccaaaataccaaggcaagaacgcgacaatttacccgtaattacagactatactggaaaaatcctttgggtgcccggcgtgaaaaagtctgcatatgaccgagaatttagtcgtagcaaaaagcaatacattattaggtacactcgaaatataggaggaaacgagagcatgcataatgatattcagaaagtactgatatcggaggacgaattacaagagaaaattcgtgaacttggtcgtgagttgacagcggaatatgaaggacgtaacccattagtggtaggcgtgttaaaaggcgcaaccccttttatgactgatttacttaaaagaatagacacatacttagagatggacttcatggatgtttccagttacggaaatggtacagtatcatcgggtgaagtgaaaattattaaagacctgaatgcttcagtagaaggtcgcgatgtacttataattgaagatataattgatagcggtcgtacacttagttacctagtagacctaatcaaatatcgcaaagcaaaatcagttaaactggttactttgcttgataaaccagctgggagaaatgtggcaattgaagctgactatgtagggtttgttgtacctaatgaatttgtagttggatatggcctagactatgctgaacgttaccgtaatctaccatatatcggtattttaaaaccagaaatttatagcgagtgaaaataattaacaaacagaactattttttgttaaaatgtaatagatatctttttcgaaaacaaaaagaaaaaaattgctggcaaacatgcaaaatagtgggcaatctagattcggtatgctatcattagtcttagttttcgaaggtgaaaattgtatcaataaatattaaaaaatctaaattaataatagaataacttcgtgagagaaaaagcgaaacggatatgtttttaataatcaggggaagaaaacattgtttctcaatctgctattagtaaaaaacaacttttaaaggggtaaaagtccagagaaagtaagaatccaagctcttacgtgggaggaggtaaggaatgaacaggttttttagaaatgcgatattttatgtcataatattccttgttattatcgggattgttgcttcatttaattcaaataaagaggcagccaaagatattagctattcagaatttgtgagtaaattagaagatggtaaagttaaatccgtagaaatacagccagaccgcagtgtttatacaatcgaaggagaatttaaatcaagcgataaaagctccgacgacaaaaaaaccggtcttggccaaagtaaaacaagcagcactgctttcacaacatacgctttaaatagcgatacttcacttggcgatttgcaaaaaacgcttgataaagaagacgtgaaaacaacagtagtacctgccaaacaaaacagcggttgggttacattcctaacttctattgtaccttttgtaattatcttcatcctcttcttcttcctaatgagccagtctcaaggtggtggcggcggtaaagttatgagctttggtaaaagtaaagccaaactttacaacgacgacaagaagaaagttcgcttcacagatgtagctggagcagacgaggaaaaacaagagcttgttgaagtagtagaattcctaaaagatccgcgcaaatttgcggaccttggcgctcgtattccgaaaggtgtccttttagtaggtcctccgggtactggtaaaaccttgctagctcgtgcagttgccggtgaagcaggcgtgccattcttctcaatctcaggttcagactttgtagaaatgtttgtcggtgtcggtgcaagccgtgtccgtgatttattcgaaaatgcgaagaaaaatgcaccatgtatcattttcattgatgaaattgatgcagttggtcgtcaacgtggagcaggaatgggcggcggtcacgatgaacgtgaacaaaccctaaaccaattactagttgaaatggatggtttcggcggcaatgaaggtatcatcattattgcagcaactaaccgtgcagacgtacttgacccagcacttcttcgtccaggtcgttttgaccgtcaaattatggttgatcgtccagacgtaaaaggccgtgaagcagtacttcgtgttcatgctcgtaacaaaccacttgctaaaagtgttgatttaaaagcaatcgctcaacgtacaccgggattctctggtgccgatttagaaaacttactgaatgaagctgcacttgttgccgctcgttccgataagaaagaaatagacatgagtgacctcgatgaagctagtgaccgcgtaattgctggaccagctaagaaaaatcgagttatctctgaaaaagaacgtcgcacagttgcatatcatgaaggtggtcacgttatcgtcggaatggtacttgatgaagcggaagttgtgcataaagttaccatcgttcctcgtggacaagctggtggttatgccgtaatgttaccaaaagaagatcgcttcctaatgacgaaagctgagttaatggaccgtattactggtttactaggtggacgcgtagccgaagaagttacttttggtgaagtaacaactggtgcaagtaatgactttgaacgtgcaactgaacttgctcgccgcatggtaactgaatggggtatgagtgataagattggaccacttcaattcacttctggtaatggtcaagtatttatgggccgcgattttggtagcgataaaggatattccgataaaatcgcctacgaaattgatacagaagttcaaagcttaatccgctactgttatgaccgcgctaaaacaatcattacagaacaccaagagcaacataaacttatcgcggaaacattactaaaagtagaaacattagatgctcgccaaattcgttccctatttgatgacggtgtaatgcctccagatatcgatacgattgacgtagaagcggaatatccttccgaaaaagacgaagaagtagcaggtaaatcttttgaagaagaaaaagaagacttgaaagaagaaaaagtcgaagaaacacaagatgaaccaaaagaagtaacttcggaagatgctccaaacattgagcaaactccaaacgataaaaaagacgaataagatcaaagaggctgggctttcccagtctcttttttgaagctatattattcggatttttaagtaaaacatgttatgatacgttagaaaaatcttctaaaggacggtatttaaacttatgatacttgtaatagacgtgggaaacactaactgtactgtcggagtttataaagaacagaaacttctaagacattggcggatgacaactgatcgtcatcgtacttccgatgaattaggaatgacagtcttgaactttttttcgtatgcaaatttaacgccttctgatattcaaggaattattatttcgtccgtcgttccaccaatcatgcacgcaatggaaacaatgtgtgtacgctatttcaatattcgaccgctaatcgttggtccaggaataaaaacaggcttaaatctaaaagtcgataaccctcgtgaaattggttctgatcgaatcgtaaatgctgtcgctgcttcagaagagtacggaactccggtaattgtagtcgattttggaactgcaaccactttttgctatattgacgaggctggagtctaccaaggaggcgcaattgctcccggtataatgatttcaaccgaagccctatacaatcgtgccgcaaaacttccgcgggtagacattgcagaatctagccaaattattggtaaatctaccgtggcatcgatgcaagcgggtattttttacggtttcatcggtcaatgcgaaggaattatcgcagaaatgaaaaagcaatctaatacaagtccggttgtagtagcgactggcgggctagctcggatgataacagaaaaatcttccgcagtagacattttagatccgtttttaacattaaaaggtttggaacttctctatagaagaaacaagccaaccacagaaaaataaaaggagttttatataatgagcgattatttagttaaagcgttagcctacgatggcatggcgcgtgtatatgcagcagtaacaacagaaacaatcaaggaagcacaaagaagacatgatacatggtcagtttcctctgccgcacttggtagaacgatgactggaacacttttccttggagcaatgcaaaaagaagaccaaaaaataaccgtgaaaatcgaaggcgacggcccaatcggtccaatcgtagctgatagtaacgcacaaggtcaaattagaggttacgtaacaaatccacacgtccacttcagcgaactaaatgaggctggaaaactagacgtccgccgcggtgttggaacatccggcatgctttcagtagtaaaagatttaggctttggagaaaatttcactggtcaaacaccaatcgtttcaggtgaaattggcgaagactttacttactatttagcgacatctgaacaaatcaattcatcagtaggtgttggagttcttgttaatccagatgatacaatcgaagcagcaggcggtttcatgctgcaacttcttccaggtgcaacagacgaaatcattgatgaaattgaaaaaaatctctctacattaccaacagtttcaagaatgattgaagccggagaaacaccagaaactattctagctaaactcgcaggcggcgaagataaactacaaattttagaaaaaatccctgttgcatttgagtgtaattgctccaaagaacgttttggtagtgcgattatttcacttggaaaagaagaaatacgttcgatgatagaagaagatcacggtgccgaagcagaatgtcatttttgccgtaacacctacgatttctcagaagaagaattagaaaaactatacgaagaagcgaaatgatgaaaaaagagcgcctgactgggtgctctttttttaaaagtgattaaacttgacaaaataggtcggaattaattaaactatatgaaagacctaaaaaagataggagtgctttaaaaatgacaattgtaaattcgatcactgatttaattggaaagacacctattgtgaaacttaatcgtttaccagaagcaggtagcgccgacgtatatgtgaaattagaattccaaaatccgggtggtagcgtaaaagatcgtattgctaatgcgatgatcgaaagcgctgaaaaatcaggtgcattaaaaccaggagatacaattatcgaaccaactagtggtaacactggtatcggactagcaatggtagcagcggcaaaaggttaccaagcaatcttcgtaatgccagaaacaatgagtatagaacgtcgtaaattacttcaagcttatggtgcgaaattagtgttaactccagggccagatggcatgaaaggcgcaattgctaaagcagaagagcttgcaaaagaaaataattatttcgttcctcaacaattccacaatccagcaaacccagctgtccatgaagaaacaactggaccagaaatcgttgaagctttcggtaaagacggcttagatgctttcattgcaggagtaggaacaggcggaacagtaactggtgtaggacacgtacttaaaaagaactacccagatgttaaaatctatgctcttgaaccagaagaatccccagtacttagcggtggttctccatcgcctcataaaatccaaggtatcggagctggttttgtaccagatacattagatacaaaagtttatgatggcattttgaaagtttcgagtgaagatgcgcttgaaacagcacgcgaagtagcgaaaaaagaaggtatcttagtaggtatttcttccggagcaactattaaagccgctctagaccttgcaaaagaacttggtgctggtaaaaaagtgctcgcaatcgttgcaagtaacggcgaacgctacttaagtacaccgctttataattttgaagattagtaatccagagagcctagattttctaggttctttttttatgataagaaataaatgcatttcttactattttctaatcaaatgcacagcggaaattttctttttctagttaaaatgtatttataagctaacaacaacaaaacattttcattctttccccttttagaatggaaatcccaaactccctttttagccagtgtggtttactccctttttccacactggttttttaatgcaaaaaaatgaaaagaaaaaccgagaaatctcatgaaactttaacaaaaatcacagtgtatccaccaaaaacttggttaatatatagtcataagctaacaacaacaaaacattttcattcttcccccttttagaatggaaatcccaaactcccttttttgaccagtgtggtttactccctttttccacactggttttttaatgcaaaaaatgaaaagaaaaaccgagaaatctcatgaaactttaacaaaaatcacagtgtatccaccgaaaacttggttaatatatagtcataagctaacaacaagcaaaacaattcattctttcccctttttagaatgaaattcctaaactccctttttgaccagtgtggtttactccctttttccacactggttttttaatgcaaaaaaatgaaaagaaaaaccgaaaaatctcatgaaactttaacaaaaatcacagtgtatccaccaaaaacttggttaatatataatcataagctaacaacaagcataacattttcattcttctcccccctattagaatgaaaaccctaaactccctttttttgaccgatgcggtttactcccttttccgcatcggtttttttgtgcgctaaaatcactgaattctgctataataaatctcggaaagaggtgttggtgcttgaagaagtggaaaagggatcacctaggtatggtcatgggaatattgaatgttacgccagactctttttcagacggcggaaaatatatgcaagtagaagaagctgtagctcgagctgtacaaatggcgaaagatggagcggaaattatcgacattggtggaatttctactcggccgggtttttcggaagttacaccagaagaagaacttgcacgaattattccggttattaaagctgttagaaatgctcttccagatatatggatttcagttgatacttggcgagcggaagtagcggaacaagccgttttagctggagctgacatgataaatgatcaatggggtgcgaaaaaagaaccgaaaattgctgaagttgcagcgaagtatggtataccgatttgtttaatgcataaccgagaaaatacgcaatatcaagatttcttagaggatgtgaagaaagatttattagagagtgttgcaatcgctaaagcagcagctgtgccagatgaacatatcattttagatccaggctttggattcgttaaaacaccagctcaaaatttagaagtattgcgccgtattgatgaaattgtcgcacttggctatgaagtcctgcttggaacaagtcgaaaatcaactattggtttggtgcttggaactactcctctagatagaatggaaggaactggcgcaacaacagtttacggatttgcaaaaggatgtacaattactcgtgtacatgatgtacttccgatagctcgcatggtacggatgacagatgcgattactggtaaattagatattacaaaattataaagaggtgctttgattggataaaatttatttaaatgaattagcgttttatggttatcatggagttttacaagaagaaacaaaattaggtcaaacatttagagtatctctaatccttggactttctacaaaaaaagcaggtcaatcagatagtgtagatgacactgtaagttatgcggatgtctatgaaaccgtgaaaggaatcgtagaaggtacgccgtttaaactaattgaagcccttgctgaaaaaatcgcatcagaagttttaacagactatccgcttttagaagagattacggtcaaacttattaaaccaaatccgccaattccaggtcactatgattctgttgcagtcgaaattaaacgtaagagaagtgatttggatggctaaagcttttttgtcgattggtacaaacataggggaacgtttagataatctaaatgatgcactaagaggcctagctgattctgaaaaaatcaaaattactaatgtttctagcgtttatgaaacagatgcggtaggttatgaagatcaagcagcatttttaaatatcgcagcggaagtcgaaacggactttacgccaaatgaattactagacttttgccttgctctcgaacttgaattggggcgagttcgattgtttaaatgggggccgcgcttaatcgatattgatattctattatacgacgatgttaaaatcgatacagaaaagctaaaaatcccacatccttatatgaaagaacgcgcttttgtaatgatacctttaatagaaatttcaccagaaaaaagcaatcttttagagaatccagcaattttagaagaacaaggcgttcgaaaaataaaaaatcaagtgaactggtaaaattggcacttgcagaaaaaactgattatgataacatatcactagcgcaatttaagaggaaggggtttaccaataatgtttaaaatcggtaacgtagaaattaagaaccaagtagttgtggcgccaatggccggtatatccaattccgcatttcgtctaacagtcaaagaattcggagcaggcctagtttgctgtgaaatgattagtgacaaaggaatcgcataccgtaatgctaaaacacttgatatgctatatattgatgaaaaagaaaaaccactaagcttacaaatttttggtggtgagaaagaaacgcttgtggaggctgcgaaatttgtggctgaaaacactacagcagatattattgatattaatatgggctgccctgtaaacaaaattatcaaatgtgaagctggagcaaaatggttacttgatccaaataaagtttatgatatggtagctgctgttgtggatgctgttgataaacctgtaacagttaaaatgcgtatcggttgggacgaagaacatgtctttgctatcgaaaatgctctcgcggctgaacgtgcaggcgctgcagctgttgcaatgcatggtcgtactcgtgtccaaatgtacgaaggtagtgcaaactgggatgtgcttagagatgtaaaacgcgagctaaaaatcccgttcatggcaaatggtgacgtaagaacacctgaagatgccaaacggatcctagaacatacaggagctgatggcgtaatgatcggccgtgctgcacttggaaacccgtggatgatttacagaactgtgaaattcttggaaacaggagaactactaccagaaccagaaccacgcgaaaaaatggaaacagctatgcttcacttaaaccgtttagtcgaattaaaaggtgaaaacattgctgtacgcgaatttagacaacacgcagcatactatttaaaaggagctcgcggtagtacccgtgcaaaagtagctgctaaccaagcgacaaaacaatcagaaatggaagcaattttaaatgaatttgttcttcaatacgaagaaaaagcattagcaaaacaagattaatcattgttgcctcgagatttcggggcaatttttaaatttatactagaaaaacaagaccaaaaaagcgtataatggaaacatctgtagaaatgaatagaataggagtgtacctatatgagtaacgagaatcatgaagaactaaatgaccaactcatcgtccgtcgagaaaaagtggacacattgcgcgaagaaggcatagatccttttggtgagaaattcatccgttccatcagcccggaagaaattgaaacaaaatttgctgataaatcaaaagaagaccttgaagaagctgcgattgaagtttctgtagcaggacgaatcatgacgaagcgtgtcaaaggtaaagtaggtttcacgcatattcaagaccgtttccatcaattacaaatctacattcgtaaagatgctattggcgaagatgcctatgcaattttcaaattagctgatttaggagacattattggtataaaaggaactattttccgcactaacacaggggagttatccgtaaaagcaacagagttcactttactttctaaatcattacgcccacttcctgataaatatcacggtttaaaagacgtagaacaacgctaccgtcaacgttatttagacttaattacaaatgaagaaagtcaaaatcgttttgttatgcgtagtaaaatcttgaaatacactcgtgattacatggataatcaaggtttcttagaagtagaaacaccagtactccataccattgctggcggagctgccgcaaaaccatttattacacatcataatgcacttgatatggaattatacttacgaatcgccttagaacttcatctgaaacgcctaattgtcggcgggatggataaagtctatgaaatcggtcgtgttttccgtaatgaaggaacatccacacgccataaccctgaattcacaatgctagaatcatacgctgcttatgaagattatgaagatgttatggacttagtggaaggcttagtatcaacagtatgtaaacaagtaaatggaacaacaaaaataacatacggcgaatacgatgtagatctgactccaaattggcgtcgtatccacatggcagacgcagtaaaagaatatgtaggcgtagatttctggaatgtaacatctgatgaagaagcacacgaactagctaaaaaacatgatgtagcagtaacagaacacatgacgtatggccatattcttaatgaattttttgaaacatacgtagaagagaaactaattcaaccaacatttgtatatggtcatccagtggaaatttctcctttagctaagaaaaacaaagaagacgagcgtttcactgatcgttttgaattattcatcgttggtcgtgaacatgctaatgcgttctcagaattaaatgatccaattgatcaaagagaacgttttgaagcacaaatgaaagaacgcgaacaaggaaatgatgaggctcacggaatggatgcagatttccttgaagcattagaatatggtctaccgccaacaggtggactaggtataggtatagatcgcctagtaatgctattaacagacgctccatctatccgggatatattattattcccaacaatgaaacatcgcgattaacaacgaatccagagctgattttaccagttctggattttgctatttttttagaaaaaaacaaatttgccaaagagaaactttttcttaaaatatgcttgcaatacctataaaaacatgatatatttataaacgttccagttaaacaaagacaaaatgttcttcaggaaattaaatttttttgaaaaaacttcttgactttaactactggatagagtaagatataagagttgctgctaaacacggcgacgaagaaaaagtgacctttgaaaactgaacaaagaagaagacgaaaagcaatgagacgtaaagtctcactggtaatcgcagggcagaaaacagaaagctgttttcaacaaaaacaaactagtaatttaattgctagcgaagtcaatttgacgcaaggaatcttattcacggtgttgaataagtattcaaattcaatttatattttaaagagagtttgatcctggctcaggacgaacgctggcggcgtgcctaatacatgcaagtcgaacgaacggaggaagagcttgctcttccaaagttagtggcggacgggtgagtaacacgtgggcaacctgcctgtaagttggggataactccgggaaaccggggctaataccgaatgatagagtgtggcgcatgccacgctcttgaaagatggtttcggctatcgcttacagatgggcccgcggtgcattagctagttggtagggtaatggcctaccaaggcaacgatgcatagccgacctgagagggtgatcggccacactgggactgagacacggcccagactcctacgggaggcagcagtagggaatcttccgcaatggacgaaagtctgacggagcaacgccgcgtgtatgaagaaggttttcggatcgtaaagtactgttgttagagaagaacaaggataagagtaactgcttgtcccttgacggtatctaaccagaaagccacggctaactacgtgccagcagccgcggtaatacgtaggtggcaagcgttgtccggatttattgggcgtaaagcgcgcgcaggcggtcttttaagtctgatgtgaaagcccccggcttaaccggggagggtcattggaaactggaagactggagtgcagaagaggagagtggaattccacgtgtagcggtgaaatgcgtagatatgtggaggaacaccagtggcgaaggcgactctctggtctgtaactgacgctgaggcgcgaaagcgtggggagcaaacaggattagataccctggtagtccacgccgtaaacgatgagtgctaagtgttagggggtttccgccccttagtgctgcagctaacgcattaagcactccgcctggggagtacgaccgcaaggttgaaactcaaaggaattgacgggggcccgcacaagcggtggagcatgtggtttaattcgaagcaacgcgaagaaccttaccaggtcttgacatcctttgaccactctggagacagagctttcccttcggggacaaagtgacaggtggtgcatggttgtcgtcagctcgtgtcgtgagatgttgggttaagtcccgcaacgagcgcaacccttgattttagttgccagcatttagttgggcactctaaagtgactgccggtgcaagccggaggaaggtggggatgacgtcaaatcatcatgccccttatgacctgggctacacacgtgctacaatggatggtacaaagggtcgcgaagccgcgaggtggagccaatcccataaaaccattctcagttcggattgtaggctgcaactcgcctacatgaagccggaatcgctagtaatcgtggatcagcatgccacggtgaatacgttcccgggccttgtacacaccgcccgtcacaccacgagagtttgtaacacccgaagtcggtagggtaacctttatggagccagccgccgaaggtgggacagataattggggtgaagtcgtaacaaggtagccgtatcggaaggtgcggctggatcacctcctttctaaggaaaaggaaacctgtgagttttcgttcttctctatttgttcagttttgagaggttagtacttctcaagtatgtttgttctttgaaaactagataagaaagttagtaaagttagcatagataatttattatttatgacacaagtaaccgagaatcatctgaaagtgaatctttcatctgataggaagtatcatcgctgatacggaacatcagaaaaacaacctttacttcgtagaagtaaattggttaagttagaaagggcgcacggtggatgccttggcactaggagccgaagaaggacgggactaacaccgatatgctttggggagctgtacgtaagcgttgatccagagatttccgaatgggggaacccactatctttagtcggatagtatccttacgtgaatacatagcgtgaggaaggcagacccagggaactgaaacatctaagtacctggaggaagagaaagaaaaatcgatttcctgagtagcggcgagcgaaacggaaagagcccaaaccaagaagcttgcttcttggggttgtaggacactctatacggagttacaaaagaaagttataaatgaagcggtctggaaaggcccgccaaagacggtaacagcccggtagttgaaatggctttccctccagagtggatcctgagtacggcggaacacgtgaaattccgtcggaatccgggaggaccatctcccaaggctaaatactccctagtgaccgatagtgaaccagtaccgtgagggaaaggtgaaaagcaccccggaaggggagtgaaacagttcctgaaaccgtgtgcctacaagtagttagagcccgttaatgggtgatagcgtgccttttgtagaatgaaccggcgagttacgatttgttgcaaggttaagcggaaaaagcggagccgtagcgaaagcgagtctgaatagggcgcataagtaacaggtcgtagacccgaaaccaggtgatctacccatgtccaggatgaaggtaaggtaatacttactggaggtccgaacccacgcacgttgaaaagtgcggggatgaggtgtgggtagcggagaaattccaatcgaacttggagatagctggttctctccgaaatagctttagggctagcctcgaggtaaagagtcatggaggtagagcactgtttggactaggggcccttctcgggttaccgaattcagataaactccgaatgccatgcacttatactcgggagtcagactgcgagtgataagatccgtagtcgaaagggaaacagcccagaccaccagttaaggtccccaaatatatgttaagtggaaaaggatgtggggttgcttagacaaccaggatgttggcttagaagcagccaccattgaaagagtgcgtaatagctcactggtcgagtgaccccgcgccgaaaatgtaccggggctaaacatattaccgaaactgtggatgaacctcttcggaggttcgtggtaggagagcgttctaagggcggtgaagtcagaccggaaggactggtggagcgcttagaagtgagaatgccggtatgagtagcgaaagaagggtgagaatcccttccaccgaatatctaaggtttcctgaggaaggctcgtccgctcagggttagtcgggacctaagccgaggccgataggcgtaggcgatggacaacaggtagagattcctgtaccagtgctaattgtttaaccgatggggtgacacagaaggatagggaatcgcacgaatggaaatgtgcgtccaagcagtgagtgtgagaagtaggcaaatccgcttcttgcgaagcatgagctgtgatggggaaggaaattaagtacggaagttcctgatttcacgctgtcaagaaaagcctctaggaagagtagtactgcccgtaccgcaaaccgacacaggtagatgaggagagaatcctaaggtgagcgagagaactctcgttaaggaactcggcaaaatgaccccgtaacttcgggagaaggggtgctctattagggtgcaagcccgagagagccgcagtgaataggcccaggcgactgtttagcaaaaacacaggtctctgcaaaaccgtaaggtgacgtataggggctgacgcctgcccggtgctggaaggttaagaggagtgcttagcttcggcgaaggtacgaattgaagccccagtaaacggcggccgtaactataacggtcctaaggtagcgaaattccttgtcgggtaagttccgacccgcacgaaaggcgcaacgatctgggcactgtctcaacgagagactcggtgaaattatagtacctgtgaagatgcaggttacccgcgacaggacggaaagaccccgtggagctttactgcaacctgatatggaatgtttgtaccgcttgtacaggataggtaggagccgaagagacgtgtgcgctagcatacgaggaggcaatggtgggatactaccctggctgtatgaccattctaacccgccacgctaagcgcgtggggagacagtgtcaggtgggcagtttgactggggcggtcgcctcctaaagagtaacggaggcgcccaaaggttccctcagaatggatggaaatcattcgcagagtgtaaaggcacaagggagcttgactgcgagactgacaagtcgagcagggacgaaagtcgggcttagtgatccggtggttccgcatggaagggccatcgctcaacggataaaagctaccccggggataacaggcttatctcccccaagagtccacatcgacggggaggtttggcacctcgatgtcggctcgtcgcatcctggggctgtagtcggtcccaagggttgggctgttcgcccattaaagcggcacgcgagctgggttcagaacgtcgtgagacagttcggtccctatccgtcgcgggcgcaggaaatttgagaggagctgtccttagtacgagaggaccgggatggacacaccgctggtgtaccagttgttccgccaggagcatcgctgggtagctatgtgtggcagggataaacgctgaaagcatctaagcgtgaagcccccctcaagatgagatttcccatttcttcggaaagtaagatccctgaaagatgatcaggtagataggtttggagtggaagtgtagcgatacatggagcggacaaatactaatcgatcgaggacttaaccaaaaaatgaaacaaagttacctaactgaaccctttcttctctagttttgagagagcaatctttcaacaacttcatattgtctggtagttatggcgagaaggtcacacccgttcccatcccgaacacggtagttaagcttctctgcgccaatggtagttgggggcttccccctgcgagagtaggtcgctgccgggcaatattatttctggaggtttagctcagctgggagagcatctgccttacaagcagagggtcagcggttcgatcccgttaacctccatttttatgccggcttagctcagttggtagagcaactgatttgtaatcagtaggtcgcgagttcgactcttgcagccggcaccattaatattatctttataataatacatatttttattgtagagagccgttagctcagttggtagagcatctgacttttaatcagagggtcgctggttcgaacccagcacggctcacttttgcgggtgtggcggaattggcagacgcaccagatttaggatctggcgccgcgaggcgtgggggttcaagtcccttcacccgcacttataaatatgcggaagtagttcagtggtagaacatcaccttgccaaggtgggggtcgcgggttcgaaccccgtcttccgcttgttttcaaaagttccaatatgccggggtggcggaactggcagacgcacaggacttaaaatcctgcggatagtgatatccgtaccggttcgattccggtcctcggcattattttcatatgcgcccatagctcaactggatagagtacttgactacgaatcaagcggttagaggttcgactcctcttgggcgcactttattaaacgggaagtagctcagcttggtagagcacttggtttgggaccaaggggtcgcaggttcgaatcctgtcttcccgattgtttcatcttttataatggggccttagctcagctgggagagcgcctgctttgcacgcaggaggtcagcggttcgatcccgctaggctccaccaattatttttttgaaaatgtgttgacattgtcaaagaaatagagtaagatataagagttgctgctaaacacggcaacgaagaaaaagtgacctttgaaaactgaacaaagaagaagacgaaaagcaatgagacgtaaagtctcactggtaatcgcagggcagaaaacagaaagctgttttcaacaaaaacaaactagtaatttaattgctagcgaagtcaatttgacgcaaggaatcttattcacggtgttgaataagtattcaaattcaatttatattttaaagagagtttgatcctggctcaggacgaacgctggcggcgtgcctaatacatgcaagtcgaacgaacggaggaagagcttgctcttccaaagttagtggcggacgggtgagtaacacgtgggcaacctgcctgtgagttggggataactccgggaaaccggggctaataccgaatgatagagtgtggcgcatgccacgcctttgaaagatggtttcggctatcgcttacagatgggcccgcggtgcattagctagttggtagggtaatggcctaccaaggcaacgatgcatagccgacctgagagggtgatcggccacactgggactgagacacggcccagactcctacgggaggcagcagtagggaatcttccgcaatggacgaaagtctgacggagcaacgccgcgtgtatgaagaaggttttcggatcgtaaagtactgttgttagagaagaacaaggataagagtaactgcttgtcccttgacggtatctaaccagaaagccacggctaactacgtgccagcagccgcggtaatacgtaggtggcaagcgttgtccggatttattgggcgtaaagcgcgcgcaggcggtcttttaagtctgatgtgaaagcccccggcttaaccggggagggtcattggaaactggaagactggagtgcagaagaggagagtggaattccacgtgtagcggtgaaatgcgtagatatgtggaggaacaccagtggcgaaggcgactctctggtctgtaactgacgctgaggcgcgaaagcgtggggagcaaacaggattagataccctggtagtccacgccgtaaacgatgagtgctaagtgttagggggtttccgccccttagtgctgcagctaacgcattaagcactccgcctggggagtacgaccgcaaggttgaaactcaaaggaattgacgggggcccgcacaagcggtggagcatgtggtttaattcgaagcaacgcgaagaaccttaccaggtcttgacatcctttgaccactctggagacagagctttcccttcggggacaaagtgacaggtggtgcatggttgtcgtcagctcgtgtcgtgagatgttgggttaagtcccgcaacgagcgcaacccttgattttagttgccagcatttagttgggcactctaaagtgactgccggtgcaagccggaggaaggtggggatgacgtcaaatcatcatgccccttatgacctgggctacacacgtgctacaatggatggtacaaagggtcgcgaagccgcgaggtggagccaatcccataaaaccattcttagttcggattgtaggctgcaactcgcctacatgaagccggaatcgctagtaatcgtggatcagcatgccacggtgaatacgttcccgggccttgtacacaccgcccgtcacaccacgagagtttgtaacacccgaagtcggtagggtaacctttatggagccagccgccgaaggtgggacagataattggggtgaagtcgtaacaaggtagccgtatcggaaggtgcggctggatcacctcctttctaaggaaaaggaaacctgtgagttttcgttcttctctatttgttcagttttgagaggttagtacttctcaagtatgtttgttctttgaaaactagataagaaagttagtaaagttagcatagataatttattatttatgacacaagtaaccgagaatcatctgaaagtgaatctttcatctgataggaagtatcatcgctgatacggaacatcagaaaaacaacctttacttcgtagaagtaaattggttaagttagaaagggcgcacggtggatgccttggcactaggagccgaagaaggacgggactaacaccgatatgctttggggagctgtacgtaagcgttgatccagagatttccgaatgggggaacccactatctttagtcggatagtatccttacgtgaatacatagcgtgaggaaggcagacccagggaactgaaacatctaagtacctggaggaagagaaagaaaaatcgatttcctgagtagcggcgagcgaaacggaaagagcccaaaccaagaagcttgcttcttggggttgtaggacactctatacggagttacaaaagaaagttataaatgaagcggtctggaaaggcccgccaaagacggtaacagcccggtagttgaaatggctttccctccagagtggatcctgagtacggcggaacacgtgaaattccgtcggaatccgggaggaccatctcccaaggctaaatactccctagtgaccgatagtgaaccagtaccgtgagggaaaggtgaaaagcaccccggaaggggagtgaaacagttcctgaaaccgtgtgcctacaagtagttagagcccgttaatgggtgatagcgtgccttttgtagaatgaaccggcgagttacgatttgttgcaaggttaagcggaaaaagcggagccgtagcgaaagcgagtctgaatagggcgcataagtaacaggtcgtagacccgaaaccaggtgatctacccatgtccaggatgaaggtaaggtaatacttactggaggtccgaacccacgcacgttgaaaagtgcggggatgaggtgtgggtagcggagaaattccaatcgaacttggagatagctggttctctccgaaatagctttagggctagcctcgaggtaaagagtcatggaggtagagcactgtttggactaggggcccttctcgggttaccgaattcagataaactccgaatgccatgtacttatactcgggagtcagactgcgagtgataagatccgtagtcgaaagggaaacagcccagaccaccagttaaggtccccaaatatatgttaagtggaaaaggatgtggggttgcttagacaaccaggatgttggcttagaagcagccaccattgaaagagtgcgtaatagctcactggtcgagtgaccccgcgccgaaaatgtaccggggctaaacatattaccgaaactgtggatgaacctcttcggaggttcgtggtaggagagcgttctaagggcggtgaagtcagaccggaaggactggtggagcgcttagaagtgagaatgccggtatgagtagcgaaagaagggtgagaatcccttccaccgaatatctaaggtttcctgaggaaggctcgtccgctcagggttagtcgggacctaagccgaggccgataggcgtaggcgatggacaacaggtagagattcctgtaccagtgctaattgtttaaccgatggggtgacacagaaggatagggaatcgcacgaatggaaatgtgcgtccaagcagtgagtgtgagaagtaggcaaatccgcttcttgcgaagcatgagctgtgatggggaaggaaattaagtacggaagttcctgatttcacgctgtcaagaaaagcctctaggaagagtagtactgcccgtaccgcaaaccgacacaggtagatgaggagagaatcctaaggtgagcgagagaactctcgttaaggaactcggcaaaatgaccccgtaacttcgggagaaggggtgctctattagggtgcaagcccgagagagccgcagtgaataggcccaggcgactgtttagcaaaaacacaggtctctgcaaaaccgtaaggtgacgtataggggctgacgcctgcccggtgctggaaggttaagaggagtgcttagcttcggcgaaggtacgaattgaagccccagtaaacggcggccgtaactataacggtcctaaggtagcgaaattccttgtcgggtaagttccgacccgcacgaaaggcgcaacgatctgggcactgtctcaacgagagactcggtgaaattatagtacctgtgaagatgcaggttacccgcgacaggacggaaagaccccgtggagctttactgcaacctgatatggaatgtttgtaccgcttgtacaggataggtaggagccgaagagacgtgtgcgctagcatacgaggaggcaatggtgggatactaccctggctgtatgaccattctaacccgccacgctaagcgcgtggggagacagtgtcaggtgggcagtttgactggggcggtcgcctcctaaagagtaacggaggcgcccaaaggttccctcagaatggatggaaatcattcgcagagtgtaaaggcacaagggagcttgactgcgagactgacaagtcgagcagggacgaaagtcgggcttagtgatccggtggttccgcatggaagggccatcgctcaacggataaaagctaccccggggataacaggcttatctcccccaagagtccacatcgacggggaggtttggcacctcgatgtcggctcgtcgcatcctggggctgtagtcggtcccaagggttgggctgttcgcccattaaagcggcacgcgagctgggttcagaacgtcgtgagacagttcggtccctatccgtcgcgggcgcaggaaatttgagaggagctgtccttagtacgagaggaccgggatggacacaccgctggtgtaccagttgttccgccaggagcatcgctgggtagctatgtgtggcagggataaacgctgaaagcatctaagcgtgaagcccccctcaagatgagatttcccatttcttcggaaagtaagatccctgaaagatgatcaggtagataggtttggagtggaagtgtagcgatacatggagcggacaaatactaatcgatcgaggacttaaccaaaaaatgaaacgaagttacctaactgaaccctttcttctctagttttgagagagcaatctttcaacaacttcatattgtctggtagttatggcgagaaggtcacacccgttcccatcccgaacacggtagttaagcttctctgcgccaatggtagttgggggcttccccctgcgagagtaggtcgctgccgggcaatagtaaaagtcctaattatttagggctttttttgttataaaaagataaataaattgctaaaaggtacaggtatctagtataattaaagtcaaaaatagtcaaagtcagtgatttggaaaatatggaaaggagattccttataatgaaaaatatttctgatattatagaagcttatttaaagcaagtactggagtctagtgaagcagttgaaattaaaagaagtgaaatcgcggataagtttgaatgtgtgccttctcaaatcaactatgtaatcaacactagatttacaatggaacgcgggtatattgttgaaagtaaacgcggtggtggcggatatattcggatcatcaaagtgaaaatgaatgataagcttcaattattagaagctattatatctatggttcatgataaaaaggtatctcaatctttttctgaagatgtaattttgaggttacttgaagaagatgttataacgaagaaagaagcaagactgatggttgctgcacttgatcgtgaggttttaattttacctctgccagatagagatattttgcgtagtaggatactcgaatcaatgttagttgctttgaaatatgattaaggtgtgatggctatgatttgtcaaaagtgtggggaaaacaaggcgataattgcgcttcaacagttaaatgaagctgggaaagtggagtcgttatacttgtgcgagaattgtgctactaaggaggcgcttgcttctgaaaaagaccttgttaaagcaatggatacttttagtgaagtagctctggattttttgacgttattacaaaaagaagaatctgctcagaaaaaagtggtttgcgaaaattgcaatctaagctttgaggagtttttacaaactaatcgggttggttgtgcggagtgttattcggcttttgaggagcaattagttccgattattggtcgagtgcaaaatggttataaaaagcatgttggaaaagtacctgtggaaattgaacgtgcggaagatgtgcagaatgagataaaccgtcttcaagataagttggcggacttagtgaaaaatgaagaatttgaggaagctgcagttattcgtgatgaaataagggctttgaaagctgggggtgaggataaatgaatgtatttgaacctcggctcagttcttggttagaaaatgctggtgatgacgatgatgttgtcctgagctcacgtattagacttgctagaaatttaaaagatgagcagtttcctatttatgaccaaaaggaagaggttgttgataatatcgcggaggtatttgatgataatttcactttaatcaaaatgaatcagatttctaagttgcaaaaggctcttttagttgaaaagcatttaattagtccttatatgatgaataaaagtgaatatggtgcagttctcttaaatgaagaagaaaatgtgagtattatgttaaatgaagaagatcatttgcggatacaatgcatgacaccgggattaaggttgtttgatgctttagaggcagcattgcaaattgatggatatgtggaagaaaaattaacttatgcttttgataaacagtttggttatttaacgagttgtgtgacgaatattggaactgggatgagagcttctgtaatggtgcatttgccagggcttgttactacgaaaagaattaaaagtgtgattgaagcgattaggagcctcggttttgtggtaagaggtatatacggggaaggtagcatgcccgctagtagtatttttcaagtttctaatcaagtgactttaggcaaaactgagacggaaatcgtggaagatttaacgcaagtcatggaacaaatcattatgcaagaacgtgtggctaggactactttgaagcaaaaatttcacattgcacttgaagatagggtttttagatcatatggtttattaatgaattgtcgaattatatctatgcaagaagcttcggatgctatttctgatattagacttggtgtggaattagggtttttcgagcatatttctcgccaaaaaatgaatgaattggtactattctcgcaaccagcttttttgagaaaagaagcaggacgagatatggatgaattagaagagaaagtaatacgggccaaagtgattcgcgagattttgggcgataaataattaggcttatgataaggaggaaacaacaatgatgtttggacggtttacgcaaagagctcagaaagtactcgcgttgtcacaagaagaggcgatgcgtttgaatcatagtaatttaggaacagaacatatacttctaggccttgtaagagaaggcgaaggaattgcggcgaaagctctctatgaacttgggattagttctgaaaaagtgcagcaagaggtggaaggcttaattggtcatggggaaaaagctgtgacaacgattcaatatactcctcgcgcgaaaaaagtaattgaactttcgatggatgaggctaggaaactagggcatacttacgttggaacagaacatatcttacttgggcttattcgtgaaggagagggcgttgcagctcgcgttttaagtaacctaggtattagtttaaataaagcgcgtcaacaagttttacagcttcttggtggcggagatgctacaggtgctggtcgacaaacaaatacgcaggcgacaccaactttagatagtttggcacgtgatttaacggttattgctcgggaagagaatttggatccagtgattggtcgttctaaggaaattcaacgtgtgattgaggtgcttagtcgtcggacaaaaaataacccagttcttattggtgaacctggtgttggtaaaacagccattgcagaaggtctggcgcagcaaattgtccgcaatgaagtacctgaaaccttacgcggaaaacgtgttatgacgcttgatatggggactgttgtagcaggtacaaaatatcgtggtgaatttgaagaccgtttgaaaaaagtaatggatgaaattcgtcaagctggtaatgttattctatttattgacgaactgcatacgttaattggcgctggtggggcggaaggtgcgattgatgcatccaatattttgaagccacctctagctcgtggtgaattgcaatgtattggtgcaacaaccttagatgaatatcgcaaatacattgaaaaagatgcagcgcttgaaagacgtttccaaccgattaaagttgatgaaccgactgtagaagagtctatccaaattttacatgggttgcgtgatcgttatgaagcgcatcaccgagttgcgattacggatgaagctcttgaggctgctgttcgtttatctgatcgctatatttcagaccgtttcttacctgataaagcgattgatgttattgatgaatctggatcaaaagttcgtttaaaatcttttacaactccaaaaaatgtaaaagaaatggaaaacaatttatccgaattgaaaaaagaaaaagatgccgctgtacaagggcaagagtttgaaaaagcagcagcattacgtgataaagaacagaaactcaagaaatcattagaagaaacaaaagcaaactggcaagagaagcaaggtcttgatcatagtgaagtaacagaagatattgttgcagaagtagttgctagttggactggaattccggttgctaaactggctgaaacggaaacaaacaaacttcttaatatggaaaaacttttacatgagcgagttattggccaagatgcagcggtaaaagccgtatcactcgctgttcgccgagctcgtgcagggcttaaagatccgaaacgtccgattggctccttcattttccttggtcctactggggttgggaaaacggaacttgcacgtgcacttgctgagtccatgtttggtgatgaagattcaatgattcggattgatatgtccgagtacatggagaaattctcaactgctcgtttagttggggctcctccaggttatgttggttatgaagaaggcggtcaactgacagaaaaagttcgtcaaaaaccttattctgtagtgcttcttgatgaaattgaaaaagcgcatcctgatgtatttaatatgttgttacaagtgcttgatgatggtcgtttaactgattctaaaggtcgcgtggttgattttagaaatacagttattattatgacttctaatatcggtgctcaagaaatgaaacaagataaatccatgggctttaatgtgattgatccacttaaagatcataaagcaatggaacatcgtgttttacaagatttaaaacaagctttccgcccagaatttattaaccggattgacgaaacaattgtattccattctctacaagaaaaagaattgaaacaaattgttacgcttctgacttctcaattaactaaacgcctagctgaacgtgatattcatgtgaaattaacagaaggtgcaaaagctaaaattgccaaagatggttatgacccagaatacggggcgcgtcctttgaaacgagcaattcaaaaagaagtagaagatatgctttctgaagaattacttcgtggcaatatcaaggtaggcgataacgttgaaattggtgtgaaagacggaaaattagaagttaggaaaaaagcagcgactaaaaagaaagctgctcccaaaaaagtaaaatcgaaataaatgatggaccttccttaaatacttaaggaaggtttttttctgaataagggctaaaaagatagaaagaagcttgaaaatacgaatttggctaaaaggcttaacgcgaacagatgatctgtggtaaaatgaagcatatgtatggagggatgtagaaatggctaaggcaaaaaggacgaccaaatttgtgtgtcagtcatgtgggtatgaatcggcaaaatggatgggtaaatgtccgaattgcaatgagtggaatcagatggtagaggcattagagccatcgaaaaaatcacgctcagcttttaatcatacaggagaaccatcaaaggcgactccaataactcaaattgcaagtgaagaagaagctcgggtagaaactaatatgcctgaattaaatagagtgcttggtggcggagttgttccgggatccatggtgcttgttggtggcgatcctggtattggtaaatccactcttttactacaagtgtcggcacaacttacacttactaataagaaagtattatatatttccggggaagaatcaattaagcaaacaaaacttcgtgcggagcggctgcaagtttccggtgataatttgtatgtttatgcagaaactaacttagaagcggttcaagaaacaatcgactttgtaaaaccagattttgttgtcattgactctattcaaactgtttatcaccctgatgtcacgagtgctgcgggaagtgtatcacaggttcgagaatgtacggctgctttaatgcggatcgctaaaatgcaaaatattgctattttcatcgttggtcatgtgacgaaagaaggcgcgattgctggaccgcgtttacttgaacatatggtagatacagtgctttattttgaaggagaacgtcatcatgcttatcgaattttacgcgcagtaaaaaaccgttttggctcgacaaatgagatggggatatttgagatgcgtgatattggtcttgtggaagttgccaatccatctgaggtgttcttagaggaacgtctagaaggagcctcgggatcaacagttgtagcttcgatggaagggactcgtcctgtgcttgtagagattcaagcacttgtatcgccaaccatgtttggaaacgccaaacggatggcaactggaattgattataataaagtttctttgattatggctgttttagaaaaaagagtaggtttaatgttacaaaatcaagatgcttatttgaaggcagctggtggagttaaattggatgaaccagcagttgatttggcggtagctgttagtgtggcttctagttatcgtgataaaccgacaagaagtacggattgttttattggagaacttggtctaactggtgagattcgccgtgttgcaagaattgaacaacgcgtacaagaagctgccaaactaggcttcaaacgaatttttatccctaaaaataatgaaggcacttggaaagtaccaaaagacgtgcaagtggttggcgtagaaacgattggagaagcattgaagaaggctttaccagactgaaaataaatacttcagcgattccatgagtactatttgcggtatagtcttttaatagtgtagaatagtgctatatgtatgtttggtaatagcccgattatatgtataaatataaaaatggaaagggggaaactaaatgcttacatgggtaattcgagtgtgttttttaatccttggcgggactacgggagtcttttcactaccagcactatgggtgaaacttgggataggacacattttgctaattaacaatccttatactgatgctttgattggtgcacttatattttatcttattactttctgggcggtgaaatatgtagaagccgcacttaattggttggaggaaaaattagctaaaattgctattgcaacgcttatttacggggggttaggtttatttgttggtttagttattgcgtttttcgcgagcaatgctttaagtcaaacaaatataccgcttttaaattcggtagtaccagttattttaacgttagtactaggttatttagggttccgtattggaattagtcgtcgcaatgaatttgggaattttgttaacaacagaaatgcgaagaagaaaacgccagaagaagagcaaaccgaggagaaatctaagaaaacctataaaatcttggatacgagtgttattattgatggtcgtattgctgatattttagctaccggatttttagatggaactgttgttataccactttttgtattagctgagcttcaacacatcgctgactcttctgatactttaaaacggacaagaggtcgacgcggattagatattttaaatcgaattcaaaaagaagactctatccaagtggaaatgtatgaaggtgactttgaggatacgccagaagtggacagcaaacttgtaaaacttgctaaagtaatgggcgggattgtcgtaaccaatgattataatttaaacaaagtatgcgaatttcaaaatgtacctgttttaaatattaatgatttggctaatgcagtaaaacctgttgtattaccaggtgagaaaatgactgttcttatggtgaaagatggtaaggagcataatcaaggcgttgcatatttagatgatggaacgatgattgttgtagaagatgggcgtaaatttattaatgaaaccattcaagtagaagtaacaagtgtgcttcaaacgtcagcaggaagaatgatttttgctaaaccatcctgattggaaggagtaaacaagcatgaattatgagctgatttttttagcagcaggacaaggcaaacgtatgaacgcggaaaaaaataaaatgtggctggatttagttggtgaaccaattttcattcatgccctgcgtccttttttggcggataatcgttgctcgaaggtgattgtcgtgtgccaagaaacggaaagaaaacatgtgagaaagttgatgcaacaacttgatgttgcagaagatagagtcgaggtcgtaaaaggcggaagtgagcgtcagtatagtgtagctgctggacttgaatgttgtggtttagagagcgtagtgcttgtgcatgacggagctaggccttttgtgacgctagatattattgatcgtctgttattaggtgtgaaacaaaataaagctgctatttgtgctgttcaagtgaaagatactgtaaagcgagttattcacgatgttgtaaaggaaacagttgatcgtgataatctctggcagattcaaacgccacaagcttttgaattacacattttacaaaaggcacatcgtctcgcaaaaaaagaccaatttctaggaactgatgaagctagtttggtcgagcggattccataccctgttgctattgtccaaggaagctattataatataaagctgacaactcctgaagatatgccacttgcaaaggcgattttaggagaacttggagggaaagtaaatgattaggattggccaaggatatgacgtacataaacttgattatgaccgtgaactgattattggcgggattaagattccatacgaaaaaggtttgctaggtcatagtgatgccgacgtacttcttcatgctattacagatgcaatcattggtgcaattggtgctttagatattggtcattttttcccggatacggatatggcttataaagacgcggattcagcagagcttcttgcggaaatttggcgacaggtggaagcagaggggttcaagcttggaaatttagatgcgactattatcgctgaaaaaccgaaaatggctccttatgtggagttgatgaaacgccggattgctgagttacttcacgcagaaccatcccaagtaaatgtaaaagcaaccacgacggagaaattaggatttacaggtagagaagaaggaatcgctagtttagcggtagtcttacttgaaaaataattaaaggagtgaataattgtgagtgaaacaaaacgagtacgtgtacgttatgcgcctagtccaactggatttttgcatattgggaatgcgcgtactgccttatttaactatttatttgcaagacataatgatggagactttattattcgaattgaagatacggatgcgaaacgtaacgtagctgacggcgaagaaagtcaaatgaaaaacctaaaatggctaggtatggactgggatgaaggtgttgatgttcctgggaaatatggtccttaccgtcaatcagaacgtcaatcaatttatgaaccactaattcaacaacttttagataaaggcttggcgtataaatgttattgtacggaagaagaattagaagcagaacgtgaaaaacaaaaagcaaatggtgagatgccgcgttatagcgggaaatgccgtcatttaacaaaagagcaacaagcagaaaaagaagcacaaggttttaaaccaagtattcgtttcaaagtaccagctaatgaaacaattacttttaacgatatggttaaagatgatgtttcttttgaatcgaatggtattggtgattttgttattgcgaaaaaagatggaattcctacttataattttgctgtagcagtggacgatcatttaatggaaatctcgcatgttcttcgtggtgatgaccatatttcgaatacaccaaaacaaattttaatttataatgcttttggctgggaacctccaattttcggtcatatgacacttattgtgaatgaaagcagacgtaaattaagtaaacgtgacggttcgattattcaatttatcgagcagtatcgtgaccttggatatttaccagaagcgttatttaactttattgcaatgcttggttggtctcctgaaggggaagaagaaattttctctaaagaagaatttattaaaatgtttgatccgaagcgtttatctaaatcgccagcattgttcgataatgttaaattgacttgggttaataaccaatatgtgaaaaaattaccgctaaatgatgtagtagaactttctttaccgcatttacaaaaagccggtgttgtatctgctgatttagatcaagcagaacttgactgggtgcacaaattagtttcgctttatcacgagcaaatgagttatggtgctgaaattgtgccactttcagaaatgtttttcgctgatgctgaatcgattacttttgacgaagaagaaaaggctgtccttgccgaagaaacagtgccgaaagttatttctgccttcaaaaaagaattagaagcgctagatgttcttgaagcggcggaagtaaaatctgccatcaaacgtgttcaaaaagaaactggcgtaaaaggtaaaggtttattcatgccaattcgtatcgtgacaactggtgaaatgcatggtcctgaattgccacttgcaatcgaagttcttggtcttgaaaaagtactaaatcgtttagatacatggttacaaaataattgattttaaatgaaagtgcctcggctatttacggggcacttttttattttgatatatttcagttgcaaggaattttattgctgttataatagaactaaatatacggaaaaagtgctgatgggaagaagtacggaattctaagcttaaagagagagtcgccgcggctggaagcgacttagctgaacactcctgaaatgcctccctgaattctgatgggaaatttagtatcgtcagacgaaatgtgggtcgttacccccacccctagagttggagtatctgctaaaattagcaatactcaagtcagagtggaaccgcgcaaagcgtctctgtattagaggggctttttttgttggcgtaggttcaatgaaaaaatgtacgaacttgaataaggaggcaacaaaatgccaactcgcttaaaagaagatattgcaacaattataaagaatgaccctgcgacgaagactttttttgatgcttttttaacgaatccgggattgcacgcactttggtggcatcgtgtggccaactttttttatcgtcacaaaatggttttgtttggaaaagtattatcgcagactgctcgtttctggactaatatagaaattcatcccggcgcaacaattggtagaaggctttttatagatcacggtgcagggattgttattggagaaactgctgaaattggtgatgatgttacgatatttcacggagttacgcttggcgggaccgggaaggactgcgggaaacgtcatccaacggtcggtgatagagcgcttgtttcagcgggagccaaagtacttggaccagttgatattggagcagatgcgcgaattggtgcgggtgcggttgttttaaaagacgtaccaccaggtgcaactgttgtcggtattccagccaaagttgttcggcttaatgggcgtacggtagggcacgcggttcctaaaatggatgaactgacgttacgaattgcagaattagaaaatatagtagaaaaacttttaaaggaaaaggagtagatctgattgtcgatacaaatttttaatacgttaaaacgagagaaagagccttttaaaccactcaaagatggcgaagtgaaaatgtacgtttgcggaccaactgtttacaactacattcatatcggaaatgcacggccgattattgttttcgatacagttcgacgttattttacgtatcgtggctacgatgtgaaattcgtgtctaattttacggatgtggatgataaattgattcgtgcggcaaatgagttgaaattgacggttcctgaagtggcggatcgttttattggggcttactttgatgatgtggatcaactgaatgtggcgaaagcgactgtgaatccgcgtgtaacagaaaatatggatgaaattattcaattaatcagcaccctaatcgaaaaaggttatgcttatgagtcagctggcgatgtatatttccgtacgaaaaaattcaaagattacgggaaactatctgggcaagaattatcggaactacaacacggagcgcgggttgaatataatgagcgcaaacaagatgaacttgatttcacactttggaaagctgctaaaccgggtgaaattttctgggaaagtccgtttggaaatggtcgtcctggttggcacatagaatgctcggcgcttgcgaaaaaataccttggcgatacgattgatattcatgcgggtgggcaagatttagtatttcctcaccatgaagatgaaatcgctcaatccgaagcagcgactggaaaaacattcgcaaaatactggatgcacaatgcctttttaaatattgacggggagaaaatgtctaaatcacttgggaattttattacgctacatgatgtgttaaaagataatgacccaaatgtgattcgtttcttcatgttgtccgtacattaccgtaagccgattacattaaatgatgctattttagaagatgcaaaaaatggcttagagcgtttaatgattgcctatcaaaatattgaccaccgcattcaaacagatgacggagaatacgtggaagaaacccacgaagatgaatggttggagcaactgacagaattaaaacaagcatttgaagatgacatggatgatgattttaatactgccaatgcgattactactttccatgagcttgcgaaacgtgcgaatatttatctttcaaaagaaacagtttccattaatgttttgcgtgaatttttaagtatgatgcgtttatttgcagaagtgctaggcttgaaattagaaaatacgcaaactgattcactggatgatagcgaagtagaagcattaattgaagagcgtctgcaagcgagaaatgaacgtaattttgcacgagctgacgaaattcgtgacattttaaaagaaaaagatattattttggaagatactgcgcaaggtacgcggtttagacgggggtaaatcatggcagaagtgaaagactacaagcaacttaatggcctcgcgcttgcctacatgggcgatgcggtgtacgagaaatttatccgcgaatatttacttgctgctggtaaaacaaaaccgaatcaactgcataaaactgcgacaaaattcgtttctgcaaaagggcaagctgtggcgcttaaagcgatgattgcagaaggttttttgacagatgaagaggatcggattgccaaacgtggccgaaatgccaaatcttatacaataccaaaaaatacagatcctggaacgtatagcatgtctacttcttttgaagctgtacttggttatctttatttagcgggtgacatggaacgacttcaagaatggatggaaaaagcgctagaaatagtagaaaaaggagtggaaaataactaatggaacaagaaaatgagcaagagtggattggtgggagaaatcctgtccttgaagtattacgatctgatagagatattcacaaaatctatgtacaagaaggttcgcaaaaaggcgttttaaaacaagtattaactttagcaaaagaacgtaaaattcaagttcaatttgtaccaaaacaaaaaattgagaaggttgtaagtggtgcacatcaaggggttgcagctcaagtcgcggcctatcaatatgctgaactggatgatttatttgcagcagctgaagcaaaagacgaaatgccgtttttcattattcttgatgagttagaagatccgcataatttaggatctattatgcgtacggcagattctgtcggtgcgcacgggattattattccgaaacgccgctctgttggcttaactcaaacggtagctaaagctagtactggtgcgatggagtatgttccagtggtgcgcgtgacgaatatggtacggacaatggaagaattacaaaaacgtggactatggatttttggaaccgatgcgaaaggtagtagcgattaccggacaatggatgtggatatgccacttgctattgttattggaagtgaaggattcggaatgagccgcttagtccgtgaaaaatgtgatttccttgttcatttaccaatgcgcggaaaagtgacatcacttaatgcctctgttgctgcaagtttgttactttatgaagtttatcggaaacgtttccctctggagaaataatgatggaacaaattctgcttgttgacgggtataatgtgattggagcttggccagaattgagtttcttaaaagatcgcgatttggaagcggcgagagataaactaattgagtggatggcggagtaccaaagctatacgggataccgagttgtagttgtgtttgatgcgcaatttgttcgtggagtaaagcgaaaaagcaagaagcatcaagttgaagttgtatttacgcatgaagatgaaacggcagacgaatatattgagcaaaaagcaattgaatggaaaaatgcgcggacgcaaattattgtagcgacatctgattatacagaacagtgggctatttttggacaaggtgcgctacggatttcttcacgtgaactactttttgaaattcaagaaatgagtaaacaaatcggacagaaaatcaaacgaattcaggaaaaaatgccaaaatcaaacctcaatctagattctgatattatttcccagcttgaaaagtggagaagaggcgaggagtaagggattgacgggctgtttctgactatgtataatgaagcaaccaaagaagaaatcctgtcgaaaaggagccgattagcctagtggagaattcagtaaatcaagaagaaatggcgatgcttgaactagctagaagcggtgatacggacgcgttagagtattttttcagtaggtatcagtcggttatttactggaaatcgacgcaatattttttacaaggtgcagagcgagatgatttaatccaagaagcaatgattgggcttttcaaagcaattcgtgattacgatgagtcaaaagaagcctcgttccgttcttttgcggaaatgtgtataaataggcaacttctttcggcggtgaagcgggcatctaggcagaagaatatccctttaaacaattcagtttcgctcgacacaccaatggctgaagatgatgtagactggactttactagatgtcatttccgaaaaagcggccgaaaccccagaagattttctaattaaaaatgaagatttaacacatgtagcgcgtcaacttgaacaagtcacaagcgaatttgaaaaagaagtattaaaacaatatttagaaggcaaaagctatcaagaaatggcgcttttcttcaataaaaaagagaaagctatcgataatgcattgcaacgagtaaaaaagaaaatgatgaagcagcttgaatgaaaaaataattgactagccaagagccaagtgttatatttatatggatgaaatgtgcctactttttggcatggcatatttaatgattgcggagttgagataatttatgaagaagaaaacatccctcgcttgttctgagtgtggttcaagaaactatacagtcaatgttagcgggacacagaaagaaactcgcttagaagtgaagaaattctgtcgacactgcaataaacatacattacatcgagaaacaaaatagacgatatggaggttttggtatgtctgcaatagcaagattctttcggaatgtttcatccgaaatgcataaagttacatggccaactagaaaagaacttttaacatacacagtaacagtagttatcacagttattttatttgctttattctttatgttaattgattttggtatcgaacaaattattaaacttatcgtgtagtgctaggaattttacaaagataatgatatactattacttgagacaaaacccgtacaactttcgggttttttattttggattatactaaaaggaggatggcggcaaaataggattgctgccaactaaacaatggaaaaaaattggtatgtagttcatacttactccggttatgaaaataaagtcaaagcaaacctagaaaaacgtgtagaatcaatgggcatgtcagataaaattttccgagttattgtaccggaagaagaagaaacagaagtaaaaaatggtaaaacaaaaacaatcaaacgtaaagttttcccaggttatgtattagtagaaatcgttatgacagatgattcttggtatgtcgtgcgtaatactccaggagttactggatttgttggttcttcaggttctggctcgaaaccaacaccattacttccagaagaagcagatcgtattctgaaaagcatgggtatggtcgaaaaacgcgctgaagctgactttgaaatcggtgaaacagttatggtcaaagaagggccatttgctgacttctctggtaaagtggatgaaatggacaacgacaaaggtaaagcgaaagtcatggttaacatgttcggtcgtgaaactccagtcgaagtggatttcaatcaaatcgaaaaactttaaaacttacaacctctacattatttgtggaggttgttttgttaaggaggcgaacaaatggacaaggctaagcagatatatttggattttaaacgagaagctatatttttagatctcgatttccctttattcttaggtaatggtccagggtgcggtgaactttgtatggattatagcgaacaagatggctatatgctttacggttatgaacgcggcgaacgaaacagtgaattcaaaacaactgattttgaagagtttaaatatgaagtttttctgcatatttgttggtacatgggaatggagtttgaactgcgccatcgtaaagaaggcatcaaacgcgacgataacatccttgaaacggatacccgtaaaatcgcttttgaaaaaacattgcagttattaaaaacagtaaacccagcttggattgataaggctgcgcaaggttacacagcgtatttgaacttatggcggaaaaaccaaaacgtctatttcgataaaacgaccatggaattcaaagtaaatctctaaaaaaatcttgcaacgaaacgcttaagatggtatcatgtataagtacgtttttgacgtatgttttaacgtgggaggggaaatatcagccccagtcaaccacatcacggacttaaggaggtatgtctcgtggcaaaaaaagtgattaaagaagttaaacttcaaattccagcaggtaaagcaaatcctgcacctccagttggacctgcattaggtcaagctggcgtaaacatcatgggattctgtaaagagtttaatgctcgcacagccgatcaagctggtcttattattcctgttgtgatcactgtatttgaagaccgttcgtttacgttcatcactaaaactccaccagcagctgtattacttaaaaaagcagctaaagtggaaaaaggatccggtgaaccaaacaaaacaaaagttgcatctgtaactcgcgctcaagtacaggaaattgctgaaacaaaaatgccagaccttaacgctgcaaatgttgaatctgcaatgctaatggttgaaggtactgcacgttctatgggtatcactatccaagactaatcgtgtgtttcacaatttgacaattaaggaggaaaagaaatggctaagaaaggcaaaaagtatcaagatgctttaaaacaaattgatgcaaacaaagtttacactgcagaagaagcagttgaacttgctaaaaaaattgacttcgctaaattcgatgcaactgttgaagtagcattccgtcttggcgttgaccctaaaaaagcggaccaacaaatccgtggtgctgttgtattaccaaacggtactggtaaaactcaacgcgtattagtattcgcaaaaggtgaaaaagctaaagaagctgaggctgctggagctgattacgttggtgaatctgaattcgttgaaaaaatcaaccaaggttggtttgaatttgacgttatcgttgctacacctgacatgatgggtgaagttggtaaattaggccgtgtccttggaccaaaaggtttaatgccaaaccctaaaactggtacagtaactatggacgtaactaaagcagttaacgaaattaaagctggtaaagtagaataccgtgttgataaagctggtaacgtacacgctgcaatcggtaaagtatcttttgatgctgctaaactagtagaaaacttccgtactgtgaatgacgttctacaaaaagcaaaacctgctgctgcgaaaggtacttacgtgaaaaatctttccgtaacaactactttcggacctggaatcaaagtcgacccagctagcttataaaatttaacttgaccagccccttgtcttttgataagataggctagttgaaacaatcaaatatccttaccgtagacagttggcgcgtttatcgcttaaatatgccacccgagggatttcttttgaagtgtgcgtccgcgcgcatttcacaaaaacctctggcgtctacggtgtcagaggttttttgttgctgatcaaacggaactagtgtctgtttaattagatttaattgttggacggaggtggaaaaatgagtaaagttcttgaagctaaacaaagtgcagttgaagaaattaaaactaaattatcagctagtgcgtctacagtaattgttgattaccgcggcttaaacgttggcgaaatcactgacttacgtaaacaattgcgtgatgctggtattgaatttaaagtctacaaaaactcactaactcgccgtgctgttgaagctaacggttacgaaggtttagaaggagctctaactggtcctaacgcaatcgcattcagtaatgaagacgtagttgcgcctgcgaaaatccttaacgatttcgctaaagatcacgaagcactagaaatcaaagccggtgttattgaaggtaaagttgcttctcttgaagaaattaaagcacttgcaacacttccatcacgcgaaggattgctatctatgctttgcaacgtacttcaagctccagttcgcggtcttgctatcgctactaaagctgttgctgaccaaaaagaaggacaagaagcataatctgttctacccaggggaaaccctacaaacaaatctcggttaaatccgaaaaaattatattattggaggaatttcaaaatggctttaaacattgaagaaatcattgcttccgtaaaagaagcatctgtattagaacttaacgatttagtaaaagcaatcgaagaagaatttggcgtaactgctgctgctcctgtagctgtagctgctgctggtggcggtgctgctgagcaaactgaattcactgtagaactagcttctgctggagattctaaaatcaaagtaatcaaagtggttcgtgaaatcactggtcttggcttaaaagaagctaaagaattagttgacaacgctcctaaagctcttaaagaaggcgttgctaaagacgaagctgaagaaatcaaagctaaacttgaagaagttggcgctaacgtagaagttaagtaattaacttaaagaccttagatacttgttatctaaggtcttttttattgcaattaatcaagtttaagatgagttaccaaaaatgctacatccgagtaagattttatgctaaaatagctagagatacgaaaggaaggtgcggttcttgactaacaatcattactacacaaacgacgaaacaattaaacacaaccgaaaaacatggcaagtgatgttaaaaggttttaatatgagttttacaagtgacaatggcgtgttttccaaaaatacggtcgattttggttcgaaattattgattgaatcttttgagttagaaacgaaaatagggaaaatcttggatgttggttgtggttatggtccgatggggttaacggtagcgaaagcgttccctgatagccaaattgaaatggtagatgttaatttgcgcgcactggaacttgcgaaagaaaatgcggaaatcaataaaattacgaacacgcatatctatgaaagttcggtttatgataacgtaactgcgaacgattaccaagcgattattagtaatccgccaattcgagctggtaaaaaggtggttcacgcgattttagaaggtgcttacgatcacttgcgagaaaccggagaactctggattgttattcaaaagaaacaaggcggtccatctgctgaaaagaaaatggaagaagttttcggtaacgttgaaacagtggcgagagataaagggtattttatttttagaagcgttaaaaactaaaattcaggtagttatggaattttgcaaaatacttgaattaatgagtgctaattaaatttcaaaacataatgaaaaagaagcggcaaatattataacatgtcgcttcttatttttctagaaaaatatttgacataggtggagagatgttgtattatagtataatgccaaaagaatctataccgtttttttgcgctgcattttatttcaaaatatgacaaaaaatgaagcgtttacgcggtttttggtgctataaataaacatggatgtggttttcagaaatagttgatgaaatccgctttctttttgtctaaagcagcaattttttctttttgaagttccacttgatttcgacctaggttttgtctgattgcgattatgcgaatcagatgtacacaaggtagcaggaaacttttgatgaacgatgtttaaggctgatgaaggagtatggaagtacttacttttgaacgatttaacttaaacatcgggtgcggggggttccactgtttttgtgcctaaaagagaagtcagtgtgcttataaattttttaattaatttgaggggtgaatagtttgtcaggacattcaggacatgatgtaaaatatggacggcatcgtacgcgtagaagttttgcgcgaatcagtgaagtacttgaattaccaaacttaattgagattcaaacagcttcttaccaatggttcttagatgaagggctacgtgagatgttccgcgatatttcgccaattgaggattttgcgggtaatttatctttagaattcattgattacgatcttggagaaccgaaatactcggtagaagaatctaagaaccgtgatgcaaactatgcggctccactacgcgtgaagttgcgcctaatcaacaaagaaaccggcgaagtaaaagaccaagaagtatttatgggtgatttcccactaatgactgaaatgggtacgttcattattaatggggcagaacgtgttatcgtttcccaattagttcgttctccaggtgtttacttcaatggaaaactagacaaaaatggtaaaaaaggctttggttctactgtcatccctaaccgtggggcttggcttgagtatgaaacagatgctaaagacgttgtacacgttcgtattgaccgtacacgtaaattaccagtaactgttttacttcgtgcactaggctttggttccgatcaagaaattattgatttaatcggggacaatgactacttgcgcaacacgcttgaaaaagacaacactgacaatgctgaaaaagcacttctagaaatttacgaaagattacgtccgggtgaacccccaacagttgataacgctagaagcttactagtttctcgtttctttgatccaaaacgctacgatcttgcaagcgttggacgttataaaatcaacaaaaaattacatctgaaaaaccgtctattcaaccaaacattagcagaaactttagtggatccagaaactggtgaaattatcgcttctaaaggtgacattttggatcgtcgtaatttagatcaaattattcctaatttagaaaacggtgtaggtttccgcacacttcgtccaactgatggagttatggaagatagcgtactcgttcaatctattaaaatctatgcaccaaatgatgacgaaaaagaaatcaacatcattggtaacgcgtatattgaagaaaatgtaaaacacatcacgccttctgatattatttcatccattagctacttctttaacttgctacatggtgttggcgatacagatgacatcgatcacctaggtaatcgtcgtcttcgttctgttggtgaacttttacaaaaccaattccgtatcggtttatcccgtatggaacgtgtagttcgtgagcgtatgtctattcaagatatgactacaattacaccacaacaattgattaatattcgcccagtagttgcttctattaaagaattctttggtagctcgcagttatcccagttcatggatcaaacaaatccacttggcgaacttacgcataaacgtcgtctttcagcgcttggacctggtggtttgacgcgtgaacgtgctggttatgaagtacgtgacgtgcattactctcactatggccgtatgtgtccgattgaaacgccagagggaccgaacattggtttgatcaactccctttcttcctttgcgaaggtaaataaattcggctttatcgaaacgccttaccgccgcgtagatcctgaaacaaaccgtgttactgataagattgattatctaactgcggatgaagaggataattacgttgtagcgcaagcgaactcgaaattagacgaacaaggtactttcacagaagaagaagttatggctcgtttccgttcagaaaacttagcggtagaaaaagaacgtattgactacatggacgtatcgcctaaacaggttgtatctgttgcgactgcatgtattccgttccttgaaaacgatgatagtaaccgtgcgctaatgggagcgaacatgcaacgtcaagcggttcctcttatgcaccctgaagctccatttgttggaacaggtatggaacacgtatctgcaaaagactctggtgcagctgtaactgccaaacatgacggtattgtagaacacgttgaagctcgcgaaatctgggttcgtcgtgtatctctagtggatggcaaagaagtaactggcggaattgataaatatacattacgtaaatttgttcgttctaaccaaggtacttgttataaccaacgtccaaacgtagcagaaggtgaccgcgttgttaaaggagaaatccttggtaacggtccatcaatggattccggtgaacttgctcttggtcgtaacgtactagttgcgttcatgacttgggatggttataactacgaggatgcgatcatcatgagtgaacgtcttgtaaaagatgacgtttatacttcgattcatattgaagaatttgaatcagaagctcgtgatacaaaactcggacctgaagaaatgactcgtgatattccaaatgttggggaagacgctttacgcgaccttgacgaacgtggaattatccgtgtcggtgctgaagtaaaagacaacgaccttctagttggtaaagtaacaccaaaaggagttactgaattaactgcagaagaacgtttattacacgctatctttggtgaaaaagcacgtgaagttcgtgatacttcattacgtgtacctcatggcggcggtggaatcgtgcttgacgtgaagatctttacacgtgaagctggcgacgaactaccacctggtgtaaaccaattagtacgtgtttatattgtacaaaaacgtaaaatccacgaaggcgataaaatggccggacgtcacggtaacaaaggggttatctcccgtattttacctgaagaagatatgccatttatgccagacggaacacctgttgacatcatgcttaacccacttggggtaccatctcgtatgaatatcggacaagtacttgagctacacttaggtatggctgctcgtgctttaggaattcacgttgcaactccagtatttgatggagcgaatgaagaagatgtatggagcactgtggaagaagccggtatggcccgcgatgcgaaaacagttctttacgacggacgttctggtgaagcatttgataaccgtatctctgtaggtgtaatgtacatgatcaaacttgcccacatggttgatgataaacttcatgcgcgttcaactggaccttactctctagtaacgcaacaaccgcttggtggtaaagcacaatttggtggacaacgttttggggaaatggaagtatgggcacttgaagcatatggtgccgcttatacacttcaagaaatcctaacgattaaatccgatgacgtggttggtcgtgtgaaaacttacgaagcgattgttaaaggcgaaagcgttccagaacctggtgtgccagaatccttcaaagtactcatcaaagagcttcaaagtcttggaatggacgttaaaatgctttccgcagacgaagaagaaatcgagatgcgtgacatggatgatgacgactttactaatcaaaatgatgccttcaatatcgtacaaccggaaaatgcagccactgaaaagactgagtaattcggttcgataattgagactccaaaacaataagaaacaatgatttgttttttgcaaaatataaaattaagcgatcgctaagactttccctaaaagtctgggaagtgtgcgggaatccccaagcgcttcctaaagcgaatgctccaaactaatttaggaggttgggcacttgttagatgttaataattttgagtatatgaaaatcggtctggcatctccagataaaattcgttcatggtctcacggtgaagtaaaaaaacctgaaaccatcaactacagaacgcttaaacctgaacgtgacggcttattctgtgaaagaatttttggaccaatgaaagactgggaatgttcttgtggtaaatacaaacgtgttcgctataaaggcgtagtttgtgaccgttgtggagtagaagtaacgaaatcaaaagtgcgccgtgaacgtatgggccatattgaactcgcagctcctgtttctcacatctggtacttcaaaggaattccaagccgtatgggtcttgttatggatatgtccccacgtgcattagaagaaattatctactttgcatcttacgtggttacagaaccaggcgatactccacttgaaaagaaacaacttttatctgaacgtgaataccgcgtttaccgcgaaaaatatggtaaaggtttctcagctggtatgggcgcagaagctatcaaaaaaatcttagccgatatcgacttagaaaaagaaacaaatgatttaaaagaagaactaaaatctgcacaaggtcaacgtcgtactcgtgcaattcgtcgtttggaagttatggaagctttccgtaattccggcaacaacccaagctggatggtacttgacgtgctaccagttatcccaccagaaattcgtccaatggtacaacttgaaggtggccgttttgcaacaagtgatttgaatgacttatatcgtcgggtaatcaaccggaacaaccgtttgaaacgccttcttgatttaggtgcaccaaacattatcgtgcaaaatgaaaaacggatgctacaagaagctgtcgatgctctaattgacaacggtcgtcgtggtcgtccagtaacaggtccaggtaaccgtccgcttaaatccctttctcatatgcttaaagggaaacaaggtcgtttccgtcaaaacttactaggtaaacgtgtcgattattctggtcgttccgttatcgtagttggacctaacttaaaaatgtaccaatgtggtcttccaaaagaaatggctcttgaattattcaaaccatttgttatgaaagaactagttggacgcggtttagcacacaacattaagagcgctaaacgtaaaatcgaacgtatggctccagaaatttgggacgtattagaagaagttatccgtgaacatccggtactacttaaccgggcgcctacgcttcacagacttggtattcaagcatttgaaccaacgctagttgaaggtcgcgcaatccgtcttcaccctcttgtatgtacagcttacaacgctgactttgatggtgaccaaatggcggttcacgttcctttatccgcagaagcacaagcagaagcacgtattttaatgcttgcagcgcaaaacattttgaaccctaaagatggtaaaccagttgtaacaccttcccaagatatggtgctaggtaactactaccttactttagaacgtgaaaatgctgtcggcgaaggtactatcttcaaagatatcaatgaagcgcaacttgcgtatcaaaacggctatgtacacttacattcacgtattgctgtatttgctggttcgattccaaatgaacgtttcactgatgaacaacgcaaacaattattaattacgactgttggtaaactgattttcaacacaatcttaccaaaatcgttcccttatattaatgaaccaacgaaattcaacttagaaatcgaaacaccagcgaaatatttcgttgatacaacaactgatgttcgtgctcatattgcggcacaagaactaatcgatccattcaagaagaaaatcctcggtaacattatcgcggaagtcttcaagaaattccatattaccgaaacttcaaaaatgcttgaccgtatgaaagatcttggtttcaaaatctcgactaaggccggcatgacagtaggtattgcggatattctaacacttgaagaaaaacatgaaattcttgaaaaagcacatgatactgttgaaaaaatcactaaatcattccgtcgtggtttgattacagatgatgaaagatacgaacgcgttatcggtgtatggaatgctgccaaagacgaaatccaaggaaaactgatcttgagtttggaccgcttaaacccaatcttcatgatgcaagattccggagctcgtggtaacatttccaactttacacagctagctggtatgcgtggactgatggctgacccatccggacgtatcgtagaattgccgattacatctaacttccgtgaaggtttaacggtcttagagtacttcatttctacccatggtgcgcgtaaaggtcttaccgatacagcccttaaaacagccgattccggttaccttactcgtcgtcttgttgacgtggctcaagatgttatcattcgtgaagacgattgtggcactgaccgcggtcttacaattaaggctatccgtgaaggtactgaaatcatcgaaccacttgaagaacgtctggaaggtcgttattctcgtaaaacaattcgtcacccagaaacaaaagaagttattgcacgtgaaaatgacttaattacagaagcaattgcaactcaaatcgttgacgctggaattgaagaagtaactatccgttctgcattcacatgtaatacaaaacacggcgtatgtaaaaaatgttatggtaaaaacttggcaactggtacagaagtcgaagttggagaagcagttggtatcatcgctgcccaatctatcggggaaccaggaactcagcttactatgcgtacattccatacaggtggggttgccggagacgatatcacgcaaggtcttccacgtattcaagaaatctttgaagcacgtaatccgaaagggcaagctatcatcactgaagttggtggtgaagttgtttctatcgaagaaggtcgtgaccgtcaacaagaaatcactatccaaggtacagatgaccgccgttcttacaacattccttacactgctcgcttgcgtgtagaagaaggaagtattgttgaacgtggggaagctctaactgaaggttctgtggatcctaaagccttgattcgtgttcgtgacgtattatccgttcaagaatatctacttgctgaagtacaaaaagtttaccgtatgcaaggggtagaaattggcgataaacacgttgaagtaatggttcgtcaaatgttacgtaaaatccgcgtaatggatactggtgatacaaacatcttaccaggtacattaatggatattcatacgtttacagaagccaaccgcgatgctatcttaagtggtagccaaccagcaacaggtcgtccagttcttctagggatcacaaaagcttcccttgaaactgattccttcttgtctgctgcatcattccaagaaacaactcgtgtcttgacagatgctgcaatcaaaggaaaacgtgacgaacttctaggacttaaagaaaatgttatcctaggtaaacttgttccagctggtacaggtattggtcgttaccgcaaactgaaatccgaagttatcaaggaaacagctgaagtaactgacgaaatcacaaatatttaattttataaagccaagtgtgtcgttcgcgcgcacttggctttttttgttatactctagaaaaaggagtgaagtgatttgattacacatgttatttgggatatgggcgaaacattaaataccgtaccaaacacaagatacgaccatcaccctctcgatacttacccggaagtagtgctgcgcaaagacgccaaagaaaccctcgaaaaagtaaagcaactcggattcaaacaagcaatcctcagcaacaccgcaacgagcgacacagaagtaattaagcgcgtactaaccaatttcgacatcatcgattattttgatttcatttacgcatccaattccgagttacaaccagggaaaatggaaaagccagataaaactatttttgacttcaccttaaatgaacttaatattgataaaacagaagcagtcatggtcggaaatacgtttgaaagtgatattattggcgcaaatcgtgcaggtatccatgcgatatggctgcaaaatccagaagtctgtcttcaagatgagcgtttgccccttgtcgcgccaccatttgttatcccagtttgggacttagccgatgttcccgaagcccttttattattaaagaaaatttcttcttgacctgtaatgcattacacaaagtaaactaaaaaagtagaagatattagccggaaggggcgaacgaaatgactgaagtgaaaaaacaatttccaaaaggatttttatggggtggagcaactgctgcgaaccaagttgaaggcgcttacgatgtagatgggaaaggcctttccacagcagatatggtcaaattcattccaaaagaagaacgcacgaaagatcatgcattagatgtatctaaagcagaaatcgaagcaattatcgcagggaaagtagaaggaagattccctaaacgtgaaggcgttgatttttatcaccgctataaagaagacatcgcattatttgccgaaatgggctttaaaacattccgcctatcactaaactgggcgcgtattttcccgaacggtgatgacaaagagccgaatgaaaaaggtcttgaattttatgataaggtgtttgatgaattattaaaatatgacattgagccacttgtaacgctttctcactatgaaacgccactaaatctaactttaaaatacaacggctgggctgatcgtcgcgttatcggatttttcacgaactacgcagaaacagttttcaaacgttataaaaacaaagtaaaatattggctaacttttaacgaaatcaatgttatttcacttagcgcatatactggtggtggcgtacttttagaagatgctaaaaacccactagagctttcttaccaagcggggcatcaccaattcgtagccagcgcacttgctacaaaattggcgcatgaaattattccaggatcacaagttgggtgtatgctagcgcgtatggcgacatatcctgcgactaacaaccctgatgacatcttaaaagcacaatacgaaaaccaacaaaacctatttttcacagatgttcatgctcgcggtgaatacccaagctacatgaaccgcttcttccaagaaaacgacattaacatcgtaaaagaagttggcgacgacgaaatcttaaaagcacacacggttgatttcatctcattcagctattacatgtccctatccgcaacagctagcccagaaggcgaccgctctgctgggaacttaatgggtggcgtgaaaaatgaatacttggagtcctccgattggggttggcaaattgacccgaaaggcttacgctggacattaaacgatctatatagccgctatgaattaccacttttcatcgtggaaaatggcttaggtgcttatgatacagtagaagaagacggcaaaatccatgatgattaccgaattgactacttgcgcaaacatatcgaacaaatgaaagaagcaattgcagacggcgtagatttaatgggttacacaagctggggtccaatcgacctagtaagtgcctccacaagcgaaatgtccaaacgctacggcttcatctacgtagaccaagatgactggggcaaaggaacattagaacgctcccgcaaagattcattcttctggtataaaaaagtaattgaaacaaatggtgaagatttagattaatagaaagttaacagtcccgctttggcggggctgttttttatttttatatcaattaatgggatgagagctaagataacccccgggatatatagtgatgtagacgtttgcctttttccataacgggaaaacataggatggaattcaaagaaagagggcgtaaacatggaacgagaaagaaaaattcaaatcttaaaagacattgtaaatattgattcgactaatgggcatgaggaacaggttgcgaactacttacagaagttgtttgctgagtatggtattgagtctaaaaaggtgcaatatgatgtagaccgagctagtcttgttagtgaaattggttctaatgatggcaaagttttggcgttttcagggcatatggatgtggttgatgctggcgatgtatctaaatggaagttcccgccttttgaagcaacggagcatgaagggaaaatatacggacgtggcgcgacggatatgaaatcaggtctagcggcgatggttattgcaatgattgagcttcatgaagaaaaacaaaaactaaacggtaaaattaaattattagcaacagttggtgaagaagtcggtgaacttggagccgaacaactaacgcaaaaaggttacgcagatgatttagatggtttgattatcggcgaaccgagcggacacagaatcgtatatgcgcataaaggttccattaattataccgttaaatccactggtaaaaatgcccatagttcgatgccggaatttggtgttaatgcgattgataacttgctgctattttataatgaagtagaaaagtttgtgaaatcaattgatgctactaatgaaatattaggcgattttattcataacgtcaccgtaatcgatggtggaaatcaagtcaatagtattcctgaaaaagcgcaactgcaagggaatattcgctcgattccagaaatggataatgaaacagtgaaacaagtgctagtgaagattatcaataagttaaacaaacaggaaaatgtgaatctggagttaatatttgattatgacaaacaaccagtatttagtgataaaaattcggatttagtaaatgttgctaagcgtgtagcaagtgacattgttaaagaagaaatccctttactcggtatttccggaacaaccgatgcagcagaattcacgaaagccaaaaaagcatttccagtaattatttttggaccaggaaacgaaacgcctcaccaagtaaatgaaaatgtttctgtagagaattatttagagatggtggatgtgtacaaacgaattgcgatagaatttttataaatgctgcgaaaactagttctgacagtgcttttggcgataaactgaatcttaattaaaacacattttagttttttaaaagaataaacggacgaaaaatcgtcacttttaaagagaattatgctctgaaaggtctttttttagcaaaaaataatgttgctcctcgtgttaatattagttttaaatgcaataacttagtacattaattattagataggagactactatgaacgtaagaactttactagttcgtgttggagtaatattaactatggctttaggaattagtttgtggctaggcacgagtccgggaattgacgcacaagcagcaagccttgcacaaccgacaccgattaatgaagtgtttcctgacactcaaatggctttaacaatggcgaataaactagggaaaacaaaagttactgatcttgtttcgcaaagtgaattggatagcctgaccgaattgagatctaatttaccaatagcttcaattgaaggaattcagtatctgacaaacttaacagaattaaatataagtaatgctgaagtaagtgatataagtgctttgaaagatctaacaaaattaacaaagttagaaatgtatcagaataatattagtgatataaacgttttggaaaacctgacgaacataacagatttagacttacatgataatcagataacggatataagccccgtaagaaatttgactaatttagttgtactaaacttatcttataatcaaataagtgatattagtgcagtgtcaactctaagtaaactaaacgatttagggtttactgataatcaagtaagcgatattagcgcagttgctgggttaaacaatctatctagtttgagtttgggttataaccaaataagcgacataagtatactgacgaacttaaccaatttagatggtctgagtatagaccataatcaaataagtgacttaacgccaatagcgaatttgaccaatttaactttcgtgggtttgcataataatcaaataagcgacttaactccaattgcaaatttaactaatttaacaagaatgtatttatcaggtcagcaaataaccaacaatccaataccttatcacagcaatattgctattcctaacaatgtgaaaaataataaaaatgatgttatcgcaccacttgtaataagtaatgaaggaacctatgacaattctaatgttgtttggaatctagctgattatgttaataaagtgagttatactttttcacaacaggtaacgattggtagtgccacagaaactttcaatgggacagtaacacagccattagagttatatactgtgacttttgatgtggatggagtaacaactaacgagacattagaggcagataccctactaaccgaaccaacaccgccaacaaaagaaggttacacattcacaggctggtatgatgcaaaaacaaacggtactaaatgggattttgaaacggataaaatgccggcgaaagatattaccttatatgctcagtttagtgaggataaaggcccagcagatgatgatactgacaaagatacaccaaatgaccctgctataaacgatggagacgcggtgcattctttggatagttcagaaccacctgctgaggtaaatgtaaatatatcactaccaaaaacaggcgatagtcaaaacccattagttattttcatgggactgtttctgcttggtacagggattatttcgcttcacaaaatacgcaattaaataaaagtctagtatttgtttgtaaacaggtgctaggcttttttcttgcttttaataaagtttagtactaaactaatagtatcaagaggaggggacgagcatggttaagaaagaagaacggctaggggttttgctttggtttcgatttagtcgattttataatcggaatatgaagctgaccaatcagaatttgcgagcagcagggatttcgacggcgcagtttgattgcattgcccagattggtttggacaacgagattacgcagcaacagcttgccgaaaaattagttgtaacgaagggaaatgtcacccaactcctcgcaaaattagagcaattaggctatattacgcgaacaaaaacgggacgcgagaaacatattgccctcaccgaaaaaggccaagcgtgttaccgcgaaaatgtgccaaaacaagaagcttttcagcaatctcaatttgataaattaacaagagacgaacaaaaagaactactcaagttattaaaaaaattaggagagtgattatcaatgaaattagcgggaattcaccatgtatctatttttacagcgaatgcacgagctaactttgacttttatacaaaaataatggggctgcggttagtgaaaaaatcggttaaccaagatgacccttatacgtatcatttatattacggagacgaaatcggttcgccggggacagcgctaactttctttgaagttccaaatatggccaaaaaccacccatcacgcaatgcgatttccggacttagtttgcgcgtgccaaatgatgaggctttgcactactgggataaaagactcgatgagcatcgcattttccacagcaaaccaatcgaccaattcgggcgcaaaattattcgtctaaaagacacagatggcttaccagtgagcttaatttctgatgaaacaagcacacaatttacagaagtttccgcttgggaagatagcccagttccagccgaatacgccattcgcggacttggcccagtgcgcttttccgttttcaaaaaagaaaaaacagaccgccttttgacaaaaatattaggcttcgagcggattggtgcctatgaagatgatgataaattagttacagtattcaaaactggcgacgttggacttggcggcgaagtgcatgtggagtcgcgacctgatctagaacaaggcaatttaggcgctggcgggattcatcatgtggcgtttcgtgtaccgactgatggtgatttaattggttggacagaaatgatacaagaccttggctataaaaattcgggctatgtggatcgtttttatttccactctctttatttccgcgaaagcaatggcattttaattgaacttgcaaccgatgaaccaggtttccaaaccgatttcacgaaagagcatggaacctatgtagatttaccgccacatttagaagaacgtcgcgaagatattttggcgcatttaaaaccacttgatacggataaataataagaaaaccttgaaaatatgcccattcatgatacaattttagaagaatgtgtaattaggaggcagaattttggcagagggtttacgaacgatttattttgtaagacatggtaaaacagagtggaatatgactggacaaatgcaaggctggggcgattctccgctagttgcagaaggtattgacggggcaaaagcagttggcgaagtgttgaaagatacaccaattgatgccgtttatacaagtacaagtaaacgcacgcaagataccgcggcttacattcttggcgaccgcgaaatcgaaattcaacctctggaagaactaaaagaaatgagctttggaacgtgggaaggcattagagtaactgaaattgacgaacaacaccctgaagaacgcgcgaaaattctccatagcccagaaacctacaaagcagaagtgaacggtggcgagacttattatgagcttgcagaacgactgttagaaggcgttgaaaaaatcattgcagaaaatccaagtggcaacattctcgtcgtttctcacggcatgtcacttacgttattattatacttgctacaaggcgggaccattgaagatcaccgcaaagaagcaccaagaattttgaacacaagtattagcatcgtagaataccaaaacggcgaattttctcttaaaaaattaaatgaagttggtcatttagacttaaaataagttgaatcttgggcatatctcattggaggtgtgtcctagatttatacataagagaaagctagaaaaagggagaaaacatacatatgaagagaattgtcaaaatttttctacattattttttaggaattttaggaattattttaatcagctgtgttcccgcgatatttagcaaagtgacttcgtggtcatcaagcacgtactgggaggctcttaagtcgatttttacagcgattttccacccggctaaatgggaaattagttaccaaggaagcgcagaagtttttcatgtgtcgttggcagattttatcaccggaccatatttctactccatgaaaattatcgtagcgagcttgctaatttcagcgctcattgcctatttgctagtaattgcaacatttcgcgggccaaaatggttgcgccgaggcttaagcggattcctatcgatacttcaagcgtttccagatttttcctttattttccttattcaaatggccgtcgtctacatatatcaacaaaccggcgtgttcaccttgaacttttacagcttaaacggcgagcaaatttatgcagcaccaatcgtctgcttgtccatcataccaaccgtgctcttttataaaatgatgatgctcctcatgaaaaacgaatggcaagctgactatatcgagttagcacgcgggaaaggcttaactgatagagcgatactacttcgccatgccacacccaatatgatgcaaagcctgttttatcaatccaaaaccatcgtttggtttattttaagcgcctacctcgttgtagaatttttattcggtatcgaaggcgtgctctactacttactagcgggatttagcccattaaatattttcctagtattagcactcgtgttcaccccattttacttcttttacgcactaatagatctatggattagccgcgggaaaaataccgagagcgcaaatgtgactcgaattccgctgcactggaatagtttccataagacctttacggaaaaagcaaaccttaaaagcaaatggcgcaactttgtagtaacgaccgggcagctcctaaaacgcccctctttcagcataccgctggcaacacttagcatcttactaatcgcaagccttatttacgggcttatgggagacaaaatcaattcgctcaaatttatcagtgatgcgaccggacgagtaaccgatatggcgcctttcaagccaaacgcgcaagtatggctaggcaccgaccaagccggcaactccattctcgaccaattgctagtcggcatcaagtacacgctacttatagcggtcatcattgcaacactacgtgtcgtgattggctatattttggcagtaccgctcgcattttttagcaagccgcgaacccgcaattttgttcaagcgatagcggacgggatgcattatttaccactgtccctgctcgtctttattatcatggtcaacgaatttattagctattctggcgttttcgaaaccagcctatttacacgcataaccttccaaattttaatcatggttgtcatcgttttaccaattacagccaaccgaatcagcagcgaaatttcccaagtgttgaaaaaagagttcgtcctgagtgcactcgtttttggcggaaatgcccgctggattttaaccaagcatatcaatccacaaatctggtcgaaattaattctaatttggattgaacaactcattcaaacgttgcagatgtttgtccatctagctatctttggaattttcatcggtggggcaatcatgggagcggatgacggcatgctcaacccagttattcctgaattatctggtttaatcgctaatgcgaaattcgtgttcgccaaccaccaattctggataattttaccgccattagttgtatttatgattttaattctttgtttccaaatgatggcaaattcgcttttgaaaagagaagaagaaagtaaaaaagcctagttcgttttcagaactaggcttttattatttatggagtgactgtttgatagacagttactgtgacagaagggatagttggatattgtttatttaaaaagtaagcggaattatcgcctgcattttcccaagtaagtgtatcatttgagtaagttcctggagtgtaccaaacccaatcatgtaatgttactccgaagttatctttaattacaatattagtggaatcaccgagcgcaacatctggaaggtatacattttgtccagcagcttcaaacaattctaagcgatgacctgccaatgagctgaaatcactaatctgattttcttcaatttttattgacttaattgttggaatggtactgagaggtgtaacatctttaatttgattaaaattagcattgaagtattctagttgtgttttatttcttaatggctcaatagatgtcagttgattgctgtcggcataaaaaacttggagattatcgaattctgaaaggacactgatgtctgatatattatttgctgaaatagataaattagttaatagaggagtatcttttagcgccgaaatatcttttagttgattgctacttagatttaatatttttaaattagttaaattttcgaaggatggtaaggtggagatctggttaacacctaattctaagttatttaacttaggtaagttcattagcggagtaatatctgtaatttgattgtagttaagtgatactatttctagttctgttaaattagcgagattatctaagttactaatgttattttggcttaaatctacaagttttaagttgtgtaaatattccatccctgttaaatcttccacgccgaaagctatatagaccattgttttaatagtatctagttgttcttgggtgacgactgtatcctgggaaacacctagttcctgtgcgactttaaaagctagagcatcatctgggaaaatttgatcaaccgtggctggaggagcttcttgtaaatttttttctggggcagttgcaatgtttgttgtagcagcatttacttcgacttgctctgctaaaggactaaaactaatcaaggtcgtacatgcaagacttgctagaataaattttttcatgtcatcctactccttttctataatataaatggagtatagcatgcaaattatttaaaaataaaaagcaatcagatatgaacattgcataaaaaaaccgctaaaaagagtatgcttctttttagcggtttttttctttattcaaattcctctatagacttatctaaccagacctcataccattcaagaaagcctaaacgttcttcattgccaaagtaaaaatcaggatagacgccattgtcattatttctgtcatccacccaaatttctccataagaagggccatttacaacaaggttaatcgaaacgccacaaccaaagttagcgatacgcagaagtccaaaaacttctttatcttggaagcatagttcttgccaagcgtcataatcttcatcggacattccttctttataaccaggagcaatccagtcatctgtatgtggaaaaggctcacttagcgtttgcaccccgtactttttatccttgtaatcaagtgatgaacaaagcccgtcctcaagcgtttctaaaccataataagggcccattccgccgttaccaattagctctagaaaagcacgataatctggaggcaacgtaatttgatgctcattttcaaacgtggtaagagtttgattagataaaggttcgttgagtttataggcgtggctttctgaaccaaataaattcaaatcgggatctttttcttttaacgcagtgatttttgcttggattctagctagccgatcttgaaggtcagccatcatttataaatctgctccattagtttcaatcacttgtttataccagtaataacttttcttcggaatacgtgtcattggcgcatcatcttccacatcacgatcaacataaacaaaaccgtaacgtttttgatagccatttaaccagcttagaaggtctgtgaagctccaagtacaatagcctaacatatcaacaccatcactgattgcatcgcgaatagcggttgcgtgtgcgctcaggtagtcaatgcggtagtcatcatttacttctccgtccactaatttatcaaattcacctaaaccgttttcggtaattaaaattggtaaagcatagcggctattaatacgacgaagcgcaatttgtaagccttttggatcgattgtccaatcccagttggttgttttcacgaaaggattaacaacttttttgtaaacgccagggacaccagtttctttcgtgctcccttttttaccagtgaagttcatttcgttattttgaccaacaccatcaagcgggttgtaggctacagttgcggattgatagtagttaacgcccatgaagtcaggttttgcagaagcaagaagttccatatcgccgtcttcaataactggcgcaatatcgttttcttctaaatatttccaaaccgctttcggataacgaccaaaagcgtacatatccatccagaaatagctgtttaattcttctgcatcatcagcagcttgaacgtttttaggatctgtgtcgattggataatgtggtgtgtaagcaaaacttggtccgatttttccatcaggaacgatttcgtggaaagctttgataacactagcgttagccaagttagcaatgtggtttactgcgtacattctttttggatcgctaacttttggtgggtgaagtgcttgcccgtaacccatgcctacaaagatattttgttcgttcaaggaaacccaatatttcacgcggtcgccgtaacgtttgaatagtgttgtggaataatttgtgaaatcttcaatcacttggcgagattcccagccgccatattcatcaaataatgcttgcggaatatcccagtgatacaacgttacaagcggttcgatgtcatatttaagcaactcatcaattaagttatcataaaatttcaacccagcttcattcacttcgcctttaccatttggaaaaatacgagtccaagcaatggagaaacgataagcttttaggccagcttctgccattaattttacgtcttctttataacggtgataatggtcaacagctacatcgccatttgtacctttgaaagtagttccaggaatacgaacatactcgtcccaaactgatttacctttgccgtctgcgtcccatgctccttcgatttgataagctgcagatgcagaaccccataagaaatctttcggaaatggtgaacgtttttgatgttccattaatataacctccattaaagcgatttttattaaaaaactctactaatatattttaaagtatattcttttaaaaagatagttaaaaaacgcagattcggaaaggaatctgcgtttttatattatttatccagcacaaatttttgaattgcttttgctacgccactatcattgttcgatgcggtcgtatagtcagctaattgcttaattctttctggcgcattgcccattgcaattccaagtccagcgaattcaagcatcgttacatcattttcttggtcgccaatacagataacttcgctttgtttaatccctagtttttcggaaagttctttgaccgcgttgcctttactagcgtcgcgatttagaatttctaagtagaaaggggtgctgcgaactaaatggtatttttcacggaaggattcaggcattttcgcaataccagcttccagttcgggtgcttcttcaataaacattgctttcgacataataaaatcttctggaacgttttcgatttctttataaatcagttggcttccagtaagataggcttcgacaattgtgtatttcccgatttctcggttcggcgtgtaaagcgctttgtcatcaaagaaatgcatgtgcaaattactatctaagctcacttgataaatttcttttaagtcgtcgatgccaagcgttaagtgagaaataacttcttttgtatacgtatcttgaacaaacgcgccgttaaagctaatcacgtaatcgccttcttcacgtaattcaaggtcagttaaataattttctacaccaacgagcgggcgtccagtacaaagaaccacttttacaccttttaattttgcttggcgaatggcttcttttacttcatccgtaaccttatgatcatctgtcagtagtgttccatcaatatcaatcgcgattaatttatacaatatactagctccttttccatcataaactcattctagtatagcataaattaggacggatttccggctatctattgaaacgacagggaatttatggcatgattgacatggaaacttgataaaagaaaagagtgaaataatgaaacgtaattatcatgtgaaatttttaaatgaaaaagatgtagaacttgcagaggcagtttgcgcggcatcagaagattattatttaattgaacaaaataaacccgcatcaaaaagcgatgcattaaaaattatcacagaaattccagacgggaaaacgagattcgataaatttatactggcggtattggatgaaaatgaaaaaccaatcggcttagtagatattgtttctgattatccgagaaaaggtcgctggtttattggcctattattattaacaccagacgctcgtggcaatggccttggaaaagtacttcaccaaactattaaagaatgggcaaatgatggtggagctgattccttagcacttggagttctagctgaaaatgaaaaaggacgcggatttttcgagcatctaggttattcgaaacaagaaacgaaacaagcgacatatggtggaaaagagcaagaagttgatatttacactattgatattaaataaaaaaggatgcagcgtatatgctgcatccttttacttatcttatagcatcattatttctttctagaagtgcttccatattaacatgccattgtagttttacttttgaaataataccagcttcttttaattcttttaattgagaatagaaaaatgcttttgaaagcgtacagtagtttttaataactgttgtgctgactgctttagggattatcgctacgccgtcttcaggttgtatatccaggattttaataagcatttcaaaaacaaaagctaattggtcttttttatcacgatattgtagaagtgatttataatagccgtgtttagcaatagatcgcataattgtatactggaagccaaagttttcagggaatagggaaagagaatactcaatgtcttttttcttgtagatgatgatttcgcattctgttaaagtttggtacgtcaaaacaagaggtctattttggaaaatggtgtagtaacccatgaaaaaattagaagtaaatatagaataaattttatcattgtcaaaatcgatatatcctgctaatataccggattttaataaataaacgcagtctttattttcgagaactaaatcatttagtaccgtgtgttctggtatagtaatgctgttggattttaaattgtactgttccatcattgtaacaaattctttgtgattaaatggataggccatcttttatttcgtctccttcaggttcagttgtatgtacacaagtatattgtatcatcgtacaagtgaataaaggtactaaaaaaagaccctttaaatagcttgtcttatgcaattacccgtttgtgagaaaagtaatcgtaatatttttgccacatttgtgaggtaaaacgtctaaaaaaataaataacagcaaagagctaggaataacagcagttgtgcattcctagctcttttaaataatttattttcctattgtataattagcgccattaccagtaacaacgatggttttgttgcggtctgttcggtaaacttttgcttttgctttggttaatgtggtaaccgtttgcgaggtagggtggccgtagccgtttttaccaacgcttattatcgcatattttggttttacaacattgacgaaagctttactagtagctgtttttgagccttgagtgcttacttttaacacgtcagctcgtaaagttttcttcgcttttatcatatctgtttctgcttttgtttgagcatctccagtgagaaggaaggtattttttttataagttaggtgaaggacggcgctccaattattgcgatctgtttttccgtatgtttttacaggacctacaaattgtgcgtttacacctttaattggtaatttcataccagcttttgccgttttgattggtagtttcttctttttggctgtattgacaaaatctttgtaagcagctgttgtgtttgtggagtttggcgcatagaggctcttgactttaatgctattcattacttcgggcagaccgccaatattatctgcatctgggtgagaagcaaccatgacttcaatatcttttacttttaatttcttcaaataattaactacaatcttcccttttcctttgttgccggcatcgattaaaatatcttcgccactaggagccttgatgtaaatggcatccccttgaccaacatcaatgaaatgcacttttatcgttggtgttgcggcttcggcttgaatggagcttggtaccgaaatcccagctactaaagctaacactagaaacaactttaaaatcccttttttcatcccttttcctcttttcctatgaaatgaattcttttagaaatttgtaaaccccgtctgcttcattcgtgtctgtaagttgatttgctgctgctttgacattatcgcttgcgttagccattgcaacaccagttcctgcatattgtatcatgccaatatcattttcaccatcaccaaatgtgataattctttctctaggaataccgtaatattttccaagcgcttctacagcagtttttttgtcagaattagcagggagaatctctaaattattatggtgagaggaaagtacgcgaattccatttgcttgatttaacgcttgacgcacatcggctagtcgagacgtatcgtcctctgaaactacgatggcgtttaaaaattgattcatgttttcatcaaaaacatgcgaatcattaatagaaacaagtgaaaaactattatgtccagtatcaagtcggcttttatcagcaagctctcgaaaaaactcaggtggttcttttgtgtagaataatgtattcgtagagaagaaaaataatggtaaatcaaaatctcgcataatatcatatgtttcacgaatggctttttcttctaaagtagtttttagaaactcttcgtcacgaattgctgcgtaagatccattggatgcaataacatgaccagacttactaacttgaaaacctacttcacgggcggaacgatacatccgtccagtagaaattgaaaaaatatgaccgtcattttctaaagtttggattaaatcacgtgttttttcagaaacagtctgatcttggcgcagtagtgtaccatcaatatccgaacaaattaaatatttattagtcaaataaaatcatcctttttagttaataacataagtataccatgtgcgaatcggaatagttatatatgatacaatagtttttgacaagttcgaaaataaatatttgggggaattccacgatgaaaagacttaactgggcaattcttggaccaggttcgattgcgcaccaatttgcggaagggatgcaagggttaaatcgcgaaatctatgcagtaggagcacgaagtttagagaagggacaagtttttgcaaatcaatacgggattgaaaatgtatacgatgattttgatgcgatgcttgctgatcctatgattgatgtagtgtatattgctacacctcattctaaccactacgaatttattatgaaaagtttacataatgggaaacatgttttagcagaaaaagcgattactgtaagcagtgcggaactgaatgaaataaatgcattagctaaggaaaaagggctaattgttaaggaagccatgacgattttccatatgccgctttataagaaattacgagaaatagttgattcaggcgtaattggtaaacttaaaattatccaagtagctttcggcagtgctaaggaaaaggatccgaaaaatcgtttctataatatggatttagctggtggggcattacttgatattggtacatatgcattgagtttcgcgcgttactttttaagcgcggcacctgatgaagtattaacgacgatgaagaaattcgagacgggcgtggacgaacaatcaggtattttactgaaaaataaagaagaagagttggccgtagtgtcgctttctttccgagctaaagtaccaaaacgcggtgttatagcctgtgaagaaggatttatcactgtagatgagtacccgcgggcagaccgagcaactgttacttacaccgcgacaggaaaagtagaagaaatcgaagcgggtgaaacagataaagcattagaatatgaaattacagcaatggaagaaagtattgcaactggagaaaatacaatctatcaattaacgaatgatgttatcgcgattatgagtgatgttaggtcgcagtggggaattaaatttccttttgaaaaataagaaaatccccgccacacttggcggggatttttaagtatattagtcagttaagttatcttctgtttctgggtcaaagaagtgagatttagacatttcaaatgctaaagttaatacttcatttggttggtgttcagagcgagcatcaacacgagctacgaattcgtgtgtaccaacgcggctatgaagcatgaattcagcaccagtaagctcggcaacaatagtagtcgctttgaaagtgtaacctgggtttgcttcaataacgattggttcatcatgaatgtcttctggacgaataccgaaaacgatttctttaccgtcaaatcctctgtctttaagaagtttaagtttaccttctggaacagcgatagtgaaatcatcaccgataaagttagaaccttctaaacgacctttgaagaagttcattgctgggctaccaataaagccggctacgaacatattcactgggtgatcgtaaacttgttttggtgaaccaacttgttggataacaccgtctttcatgataacgatacgagttgccattgtcattgcttctgtttggtcatgggtaacataaatcatggtagtatctaattgttggtgaagttttgtgatttccgcacgcatttgcacacgtaatttcgcatctaagttggaaagtggttcatccattaggaagacttttgcatcacgaacgattgcacgacctagagcaacacgttgacgttgaccaccggaaagtgcacttggtttacgttttaagtattcagttaagccgagaatatttgctgcatgctcaacacgttttttaatttcgtcttttggcattttacgaagttttaaaccgaatgccatattatcatatacagtcatatgtggatataatgcgtagttttggaataccattgcgatgtcacggtcttttggcgcaacattgttcattactttaccatcaatagatagttcgcctttagaaatttcttctagaccagcaatcatacgtaaagttgtagatttaccacaaccagatggtcctacaaaaacgatgaactctttgtcatcgatttctaaattaaagtcagataccgcagttactttgttatcgtatattttataaatatgttctaatgataattgtgccaacttacttcgcctctttctattttttaacttgtgtttattgtatatgaaaacgctttacaaaaactatggcaatttgcacaaagaaaaaattcatctgttgggcaacttgcataagtagcaaaaaaataaaaagaagtaaagtgacaaaagaccttttatgtgaaagatttttcatggcttttaattctttagtcccaattcaaaaaaatccccagatatcattacaaaaaaactttatcttgtgttatattattatagcagacacaatatatagttagtgggggattatcatgtacgtggaacaacttaatgaacaaatggtgataaaaagggatggccgcaaagcaaactttgatttaattaaaattcgtaatgccgttgaagcatccatgaaagcaattgaattagaggacgaaacttttttagaagagattttgcttgaggttgtaagtgaattacctaacaagacagatatgaccatcgatgaaatccagcaatgcgtcgaaaatactttaatgaaatcgacgtatcctgatgtagcgagggcttacatagagtatcgtcacgaccgggatcacgagcgcgaaaacatcacagatatgcacaaaagcgtcgaaaaattactacaaaaagacaaaacagtagtgaacgaaaatgcaaataaagatgcgactgttttcaatacacaacgcgatttgacagcaggagccgtagcaaaaagctatgccttaaaatacatgctaccaaaacacgtatcgaacgctcatttaaaaggggaaatccattttcacgatttagactacagtccataccatgcgatgacaaactgttgtttaatcgacatcgaaggaatgttatcaaaaggatttacgattggtaatgccaacgtagaaagcccgaaatcaatccaaacagctacagcacaaattgcacaaataatcgcaaacgtagcaagttcacagtacggcggctgctcagttgaccgcattgatgaagttttatccgtttacgcgcgcttaaactttgaaaaacacaaaaaagatgcggctgaatgggtcgttccagaaaaacaagaaggttacgcagcggaaaaaacacgcaaagatatttacgatgcgatgcaaagcttagaatacgaaatcaatacattatatacaagtaacggccaaacaccattcgtcacactaggctttggtcttggtgaagattggtttgcccgtgaaattcaaaaagccatcctaaaagtgcgtattggcggggttggtaaagataaacatactgccattttcccgaaattagtattttcgattcgtcgtggaactaatttaaatgcggaagatccgaactatgacatcaagcaattagcgctggagtgttcctcaaaacggatgtatccagatgtacttaactacgattcactcgttcgtttaacaggcgatttcaaagtaccaatgggttgccgttcatttttaccagcttggaagaacgaaaacggagaacatgttaacgcgggaagaaacaatcttggggttgtaacgcttaacattccgcgaatcgctattcaaagtggcggagacaaagaacgtttctgggaaattttccacgaacgtatgaaaacagtcaaagatgcgctgcttttccgtttaaatcgtgttcgtcaagctcgtccagaaaacgcgccaattctttataaatatggagctttcggtaaacgactacaagacggtgaaaatgtagatcaactgttcaataaagaacgctctacgatttctatcggctatattggtctttacgaagctgcgactgtattttatggcggcgaatgggaaggcgacaaagaagcaaaaaactttacgcttgatattgtgaaagaactaaaagcctatgctgataattggaaagatgaatatggctactggtttagcgtatattcgactccaagtgaaagcttaactgaccgtttcaaccgtttagacaaagaaaaatatggcgtaattaaagacattacagataaagactattaccaaaactctttccattacgatgttcgtaaaaaaatcacaccatttgaaaaaatcgattttgaaaaagattatccagaattttgctctggcggattcattcattattgtgagtatccaaaaatggttcacaatacgaaagcacttgaggctgtatgggattactcctatgatcgtgtagcttatcttggtacaaatacaccaattgataaatgttacgaatgtgattttgaaggtgaatttgttcctacagaagaaggctttaaatgcccaagctgtggaaacactgatcctgaaaaagcagatgttgtaaaacgtacttgtggttatttaggtaatccgatgaaacgtccaatggttcatggacgccacgtagaaattagcaatcgtgtgaaacatatggagaacttaggtgaataatccaaaaccgtgcgaatggaagtcgaatgaattatccagagggtatatcgccgactataaagcattcaactttgtcgacggggagggcgtccggtgcagtttatatgtatctggatgtcctttccactgcgaaggctgctacaacaaggccgcgcaatcatttaaatacggcaaaccttacacaaaagaattagaagacgatattctaaaagacatcggacatgagagcgttcaaggtctgacgttgcttggcggggaaccatttttaaataccgccacatgcctatctgtcgtgaaacgaatccgcgcgacatatgggaaaacgaaagacatttggtcatggacaggctacacttgggatgaaatgatgcaagaaacaactgacaaactcgaacttttatccttaatagatgtccttgtagatggccgctttgaacaaaagctattcgatccaaacttagcattccgcggttccagcaaccaacgaattattgacgtacaaaaatcacttgctgctgatgaagtagtgttatatgaattgtgaaaggagccctctatcacggagggcttttttaataaatgtgaacacttatttaggcataaaatacgctaaaaaagctagcaattgactaatttttaacgtaaaggttcacaaaaagctcacaaaatgaaaacgcattgatgatataatgaaagaaatcgggtgaatagttcgaaaaattcgaaaacggcattgaatgggcttaattaacattatttctagaatggagagaataatattttggaagatattagtttgaacatacataacctaaaaaagaaatacgacgacaagaccataataaataatttgagtattacaattaattttaatcgtaaaataactttaataacgggaatgaatggttctgggaaatcaacattagcaaaaataatagcgggaattattttacctgacgaaggaatattacaaatttcaaatcataccaatttttcaaaatggacaaagagaactacgtactatttatcaagtgcagaacgaggcatgttttataaattgaacggcagacaaaatattgaatatttaacatcattaaaaggtacaaataaaaacgatgtgttaaaaaaactatctacttactgtgagaaattaaattgcaaagatattttagaaatgccagcagaaaagctatctacaggtcaaaaaaagaaagtatttatcttgtctgcgttatgttcgaactgtcagctattattattggatgaacctacaaacgggctggatgatgagagtttttatgcatttattgaaattctagctaaattaaggctagaaaaaaagatagtattaatttctcatgataaaagatttttagatatgccgaatatagagagaataatttttgaaaaaaacggtgagatttattgggaaggatgttagtatgatggattattttggggcttgtataggaacacttaaagcaaatattcttattctttttaagtacaagaaaaaccttgtttcggaattaataatgtttactggtgtatatctggcaatattaatgttaaatgatagcagttcagtaactaagttttatggtgcttctgcaattcaggggcctattcttttattaattggatatatgttttgggcattttctgatatggcattatcgagtacggccaactggattagtacggatgccaagatgggactgctggaacccaaagtccaaagtatattaccttatcctgtacaatcatttttgttacttttaatcagtattttagaaacaattatcattcttttggtagttgtccttatttccattttcgctgacaaaattagttggtcgcaagttccattcatttttttatccgtcatcatccttttgccgtctgttataggaatgtttggaatgggtctggtattcggcggttatgcggttaaagagaagagtttaggaaatttcgtaaacttgtttgcgggcgccttaatcattttttccaatacatttatcgtgggtctaccaaaaatcatttatatcataccatttacttcgggcgtggattttacgagtaatctgtatgtttctggcaaagtcgatttaggtctcctaagtataaatttatttattaatacaatttggcttattgtaggactgatattctttaattattcgttaaaaaaagaaagaactgttggtagttttgatactttttaaaagataactaatcgtcttgtaagaaaaacgaaaaaactccatctataacgcagatggagtttttatacatcaatttctcttgcttttaaataatcatatacctctttattctttagaacccattctctatcgtttttccatatttttccctggtcttttaaacgcgctaattgtttgtaaaaactgctttttgaaagattactgtaagcggctataacactagtgcgcatttcttttggtaaaatgacactgtctttttcatatggagtgccgtgaagttttccgatgttgataaaagatagctctaacttatcggaggaacttgtttcggatgaaaggcttttgaagaaagcatggcgagccaagtcacgcataatgaaaaattgaaaaccaaagttctctggaaacattgagagaaaatactctaaatctttaaacgtgtatttataaaccgtacaagtcgatatcgttttaaataaaaagtcatctacatttccttggaatagactatagtaattgacgaaggagccttttccaagaatcgtgtaaatactgtttgattctgggttcatagaaatggaaacaaatccgtcgataattaaatagacatgactatttctttgatcggctgtattaactaattcagtattttttggaacttttaatttttcgtagttgatgttaccttcgtgagataaccgaatgaattctttgtggttaaatagtgcatccattgttagcagctcctttactctttcgttaactataatatataataacaaaattaacaaaatttaatccacataaatgataccaaattgccactttattggtggaaatttgaagatttaatgagaaattgtaaaaaaacgctattctgattttagtatagttcaggacgacggtcggtaaaaacaggaattatccctctagtttcagcgactaaattcaagtcgatttcagcataaatattgccttcttcttcgccaccatgaacaataacatttcctagtggatcaataacgagcgaatgaccgttaaaatgattatttggatcatcgccaacccggttgacagcaacaacaaaagcttggttttcaatcgcacgagcaataagtagttgttcccattgtttaatgcgttcagctggccactgtgcagaaacaaaaataacttctgagccttctgaagtatgtttgcgaatccattcaggaaatctaatatcataacaaatgaaccctgcacaagaaataccatctagtcgaaatagatttttatcatttccaggttctaagtataagtgttcattcataagttggaataagtgtacctttttatatgaagaaagtagtccgccatatttatcaaaagcgtacatcgtgttggaaaacttgcttccttctgaaatagaaaccgagccgccaattatagcgatttggtgtttttctgaaagcccagctaaaaattcttttgttctctccccatttaaatcagcaaccccagctaattcatttaaagcataacctgtattccacatttctggtaaaactgctatatcggccccattttcagcagcttcaacaattgctttttcaatccgcgcatagtttgcatccggatatttaaaaactacatcggtttgacataatgccaacttccacatgttcttcgctccctttttcttttaaaaataacataagcttggtggcgagtccataccggaacactacgcaccaagctcttagtagtaaaattaatcttttttaagacgtctagataagaaatttccgaatgattgtagtgcttgtaccatgataattaatataatgatggttgtatacatgacagtcggctcaaaacgctggaaaccatattgatatgcaatcgttccaagtccgccagccccaacaagtccagccattgcagttgcgccgataagaccaattgtagcaatcgttaaaccgagaacgataccagaccgagcttcgcgaataactacgctccaaatgatttttggcgttgaaatccccattgcttggtaggcttcaataacaccacggtcaacttcaagtagggcagactccatcaagcgagcgatataaggtgcggtgaatacaacaagtggcataatcacaccttgaatcccaatagtagtaccaacaacaaagcgagttaccggaatcattaagaataataaaataatgaaaggtaacgaacgtaaaatattaattacccagttcaaaatactatatacaactagattttctgattgaccgcctttacgcgttaatgttaaaaatacgccaagtggcaacccaattgctagtgaaattacaagtgtaatcccagtcattgtaagagtttctaaaaatccttgccaaagtatcggtccccattcttcaaaaaacaaactcatagtaactcgacctcctcaacaacgactccagattctttcaaataagcaatagctttactatattcggcttcgtccccttttaaatgaacgagtagttttccaagtgttccgtttttcaaatgatctattccaccagctaaaatgcttggaagaacgtcgaatttgcgtgacacaagagcgagcgcaggttcatcagcctcatcaccaataaaatgaagcgaaactaattttccggtcgcgatatatttttcaagcaaatcttgcgggatgtcgaaactagcttccgagccaacaaagcgttttgttgtcgcgtgttttgctttggtgaaaatatcaagaacggtaccttgctctactaaatggccattttccatcacagcaacccggtcacaaatacgttgaatgacatcaagttcatgtgtaattaagaaaatcgtaatgccaagctcagcgttaatcttaagtaacaactgcaaaattgcttctgttgtttcaggatccaaagcacttgtcgcttcatcgcttaaaagaatttctggttcatgcgcaagagcacgagcaatcgcaacacgttgtttttgaccgccagaaagctgacttggataattgtttcttttatcctctaagccaacaatcgacaagtatttatttacgcgaatctcgatttcgtcttttggaacaccttctaattttaacggtttggcaatgttatcatagacagttgcggttttaagtaagttatatccttggaaaatcataccaattttccgacgagcgacacgaagttctttacttgagagggtagacaaattcttcccgtcaattaaaacttggccggcatcaggacgttcaagcaagttgatgcaacgaacgagggtactttttccggcgccactgtaaccaacgacaccgaaaatttctcctttttcgactgtaatagaaacatttttgacggcttctacggtttttccatttacgttaaatgactttgaaacttgatgtaattcgatcaaaataaaacaactccctagaatgcaggtactacagacccattaaattctttttcaataaatgcttttacgtcatcagaatggtagtatttttctaatgttttaacgacttcatcatctttgttttcgctacgaataacaaatacgtttggatatggattgtcttttgttggttcatggtaaattgcgtctttattaatagaaagtccagcacccattgcgaagttagtattgatagctgctgctgcaacttcatctaattgtgcagggatttgagaagcttcaagttcaacgatttcaaggtcaagtgggttttcagcaatgtctttttttgttgctttttcttccacgccatcttttaatttaataatgccagcatcttcaaatagttttaaaccacggtattcgttacttggatcgtttggaacgacaattttgtcgccttttttcaggtcttttaagtctttaatatcgttagagtaaacacccattgggaatgctactgttttaaaagcaacgtctaatttgtagcctttatctttcttttgttgctctaaaaacgggattgtttggtagttattcgcatcgaggtcaccgtcgtttaaagctgtatttggtgtattataatcatcaaaagttttgattttgatttcaaggccgtcttttttcgctaatttttgaacttcttcagcgatttgttggtgaggtcctgctgttgttccaatggtgatttcttttgtgcttaaggctttatcgtcacttccgcctccacatgctgctaaccctagaataaggcttgatgcaagtaaaattcctaacccttttgttaattttctcatctttttttcctccctagtatgttgattatttatccagatttattcatgaaagcaataaaaaaacttctctatttagaatagagaagtggaaagtcgaacatatccagctcctcttatctaccaaaacggaatacaccattttgctggaattagcaccttcactttacgcttaaataaagttaggttgccgggcttcatcgggccagtccctctgccgctctcgataagagaaaatattttagaaaaacctgttagttaaaaatatacgcattttaagataatttgtcaatgcttttttaagttttaaaaaaatcatactggacaaatacttcagaaaactttactattttaatcaatgaaacttgaaaaggacgggtgccaaatgaaaatttccaaacgcttgcaaaatttaccagatcaatttttttctagccttgtagaaaaagtgggaaagaaagtggcagaaggtcatgacgtgattaatctaggtcaaggaaatccagaccagccaacacccaagcatatcgtggaagcaatgaaaacagcttcagaaaatccaatgaatcataaatattcgttgtttcgtggaaaacaggaacttaaacaagccgtggctgatttttatgcgcgtgaatataatgtaaccatcgatccaaatacagaagtagccattttatttgggacgaaaacagggcttgttgaactgccaatgtgtttaatggatccaggtgatgtaatgcttttaccagatccgggctacccagattatttatcaggagcagttttaggagaagttcagttcgaaacaatgccacttattgctgaaaatgactttttaccagattttaataaaattcctgaagaaattgcgaaaaaagcggagttgatgtatttaaattatccaaataaccccactggcgcggttgctacgactcacttttttgaagaaacggttgcttttgctaaagaaaacaatatcacgattgcacatgattttgcttatggtggtattggttttgacgggaagaaaccgattagctttttagaaactccaggggcgaaagaggttggaatcgaactttatacgctttcgaaaacatataatatggctggctggcgcgtaggatttgctgttgggaataaagacgttgtcgaagcaatcaacctcattcaagatcatatgtatgtaagtttattcccaggtattcaagatgctgcaattgaggctctcacaggcgatcaaacttgtgtacaagaattaaatgctcgttatgaaagccgtagaaatgcatttatagctgcttgtgataaaattggttgggaagcaattgctccagcgggctctttttttgcatggatgcccgttccaaaagagtttacaagtagtgaattcgcggattacttattaaatgaagttagtgtagctgttgctgacggaagtggtttcgggactttcggtgagggttatgtacgcgtaggacttttaatggatgaaaaacgattagaagaggcagtggcgcgaatttccaagctacatttatttgataaagtggcacaaaattaagagattatgtgattttaagagaaaatagcttgtaataattcagataattaactgtatgtgttataattgattagtaagtctattcttagcatgttgttttatgaagacaggccggaatttaaagtatttagtgagatttttttgcattaaataaaaagtatctgtcccggttaaagccggcgaaatccaggaatgagaggactgtaaaaaaatggcagaaaagaaaattcttgtagtagatgacgaaaaaccgattgcggatatagttaagtttaatctaaataaagaaggctttgatgtatattgcgcctatgatggcgatgaagcgttagaacttgtagaagaagttcagccagatttgattttactggacattatgcttccaggtcgtgatggtattgaggtatgtcgtgaagtacgtaagaagtatgatatgccaataattatggtaactgcaaaagattccgaaattgataaagttatcgggcttgaacttggtgccgatgattacgttacgaaaccatttagtaaccgcgaattaatcgctcgtgtgaaagccaacttgcgccgtcatagccaagtaagctcaaacgctgccgaggaagaagaaaacagtgaattagaaattggttcattaattattcatccagacgcatatgttgcttcaaaacgtggagaaacaatcgaacttacgcatcgtgaattcgaattacttcattatttagctaaacatatgggtcaagtcatgacaagagaacatttacttcaaacagtttggggctatgattacttcggtgatgttcgtacggtcgatgttactgttcgacgtctacgcgaaaaaattgaagataatccaagccatccagcgtggttagttacaagacgcggcgttggttattatttacgcaatccagaacaagaataaataaacaagaagtggtcgccaagtaaaaaacttggaggaccactttttttgggtatatccgcatacttaataattatttttataaataaattgacccaaataacaggaaaaacaatacgtctaccccataacatatggtatactaatttaaatatattaccccgaataggagtagaaagacttatgcataaaatgagattttttcagtctgtacaatttaagttagttattatgtatttgctattaattattgtagcaatgcaagtaatcggcgcgtattttgtacgtgagctggaagggcaactggagaagaattttcaagattcaatcacgaatagcatcacgttgctggattataatgctagagaagaaatcataaaaaatagcgataactcagtgaagctacaaaatgatattcgagagcttttggtcgactattctcgtgcaagcagcaacataatcgaagtaagaatagtagatgacaaaggcaaaattctcgggacttccaatttagataatcaaggcatcgtttggcaaaaaagtaacgatccccttgttaaacgaaccttatcactcggaactacatctgaggataaaatttataaagacgaatcaaataaaaataaccgtgtctgggtgaacgtatcctccatcaaaaataaaggacaagtgataggggctatttatcttgtcgctgatattgaaagtgtatataaacaagtggatgatattacgaacattttcattactggtactttgattgccatgatcattacagcggtacttggaattttactatccagaacgattacgaagccaattattgaaatgaaacgtcaagcctatgcgatggcgcgaggaaactacagccggaaagttaaagtctatggtgtggatgaaattggcgaactagcagattccttcaatacattaacaaaacgtgttcaagaagcacaggccatgacagaaggagaacggcgcaaactttcctccgtacttgcctatatgaccgatggagtaattgctacagaccgccgcggaaaagttattcttattaacacgccagctgaaaaaatgctacgcgttaagcatgagagtgccaatggtcgatcaattattgatgtactagatattggtgatacctaccaatttgaagatttgatggaagtcgatggttcattaacgatggaccgtagcacgcttgataaaccatacgtactgcgcgctaatttttccgttattcaaagagaaactggatttaataatggtgttattgcggtactacacgatattaccgaccaagaaaaagtcgatcaagaacgccgcgatttcgtttctaatgtgtcgcacgaattaagaaccccgcttacaagtatgcatagttacttagaggctctaagtgacggggcatgggaagataaagaaattgcgccacgtttccttgaagtgactcaaaacgaaacagaacgaatgattcgtcttgtaaatgacctgcttaaactttcaagaatggacggaggaagagagcaattagaaaaaagtttcgttaatttcacagacttcttcaaccatattatcgatcgttttgaaatgatgaaaaaagaaacaatcatgtttaaacgccacattccaaaagaaccggttatcatcgaaattgatgaagataaagtaatgcaagtattagataatattatttcgaatgccaataaatattcaccggacgggggtcgaatttctttctacttgaaaaaatttgaagatgaaattgaagttagtatagctgacgaaggtttaggcgtacctgatgaagatttagcaaatgtattcgaccgctttttccgtgttgataaagctcgctcgcgggaaatgggaggaacagggttaggactagcgatagctcgcgaagttatcgaagctcatggtggccgaatttgggcagaacgcaacaagtccaaaggtacgataattaaattcaccctgccatacagtgacttaccggaggatgattgggaatgatgaaaaaaacaggatttcgctcatttttattaacagttctagttgtgctcagtatcgtcttaagctactttatttggaagggacaacctgattacgaagcgattaacgttaaagaagttgaaaaaacaaccattgataaaacgatgacaacatcacaagtatttaaaccatataaattagctgttaatgcaaatgaaattaattaccaaagcttagactcagacttgttaaatgagttaatggcacaaggcaaagcatttagtttctcagaagtagttcttgccaataaaaaaagtaatgaagaatacgagaaattaatccataaaaatgggacgatagagattattttccctaacaatattccgttttcaatttttgctcaaaattttcaagtggaaggagaagggctagaatctgccttctttaatcgtattgtatttgatataaataacacggatactgggcttcattccgtttattttgccaatgatgaccaagaaaatatttaccaaagctccttgcaaaataaagatattgataaaattgaaaaaattgttaaaaagaacgaaagtaaactcgcgcaaaacgataaagttatttccaacaaacgcaatctgttcttaagctccgaaaaaacaaagctaaatcgcaaaaaatacattacagattcgcttgaaatcaatctatttacctcagcgctatttcaagattcaggtacagttaagagcgaaggaaatacctatacagacggctctagcgtcattgaaatggatacagaaaataaggttttagaatatgtgaatccttctcaagagcgcactaatccagaagatttaaacaacgtcaaacgagctggtttgattcaagatagtttcaatttcgtaaatgatcatgcgggctggactggggatggcgcttattatttcaccggttacgcagccgaaagcgcaacgaccaattttagtttgtttatagataatttacaagtttataatgaagatggtatggctgatatttctgttacagaaggcctcgaagcagtttataaatacatgcgtccatttttccgtttagatacggacgttcctggagagaaaaaagaagtaactatggagtcgtcttattccgtctacaatgcactagttgaaaatcctaatgtgaaagccgaagaaatagaagatattgttcctggctatcacatgacaagaagtgaatcatctggcatgaaccgcattgttacattagagccaacttggttatataaatatcatgataaatggttcatcttccaaccagaagcagaaaaggcgggtgaataaagatggattggcgtaaaacacaaatgatttttattgtaacgctcctcattttaaatgtctttttagcagtgattttctttaataaacaattatcagatgatccagacacattaggaaatgaaactttagaagaacgattaaaagcagataatatttctcatcctgatttatcaagtaagccaactagtggagctatcttcactaccgaacaagccgcttttacgacaaaagatgttagtgatttgacaggacaagcaattacactcaaagacaacaataaacaaatatattctgtcctacaaacacccataaaagctggcaaaaaaggcaacaatcctgattttcaaaaattcatggaatccgatgtgtatcgcggcgagtcttatgagttttggaactacgacaaagatgcgcgaacacttactttcaatcaattaatcaataataatatggttctttttgacgaagctgggcaaattatcttttatttagataaagatgatcgagtaatttcttacgagcaaacgtggatgtccaaacaagatgatttaaaagacaagacaaacttaatgtcatccactgatgcgttagaagctgtttaccaacacggtgagttaaaacaagacagtgacgttgtttctgcgactttcggttactatacgaccgtgcaattgccttcagggaatgtctatttcccagtttggtgttttgaagtgaaacattccggcgagactagttacgttcttgtaaatgcaaaagatgaacaagttattaaccaatccgaaaataaaacaacaaccgagccaaccacagaattatccagtcgtcaaaaagcaaaataaaatcagagtcaacctaaatacatgaaatttaggttggctttttcaaccgattggcatgcaattttaccgaattagcgttacaatggaagatatataagcctttagggggataaaaaaatgttcgcaaataaaattctaactgaaaaagacacggaccaaatccgatttagtatattagccagtggaagttcaggaaatgcaactctagtagaaactggcgaccaaaaaattctcatcgactgtggtttaagcggcaagaaaatggaaggtttattcgcgcaagttggtcgagatatgaatgatttagacgcgattttaattactcatgaacactcagaccatattaaaggccttggtgtgcttgctcgtaaatataaactccctatttatgctaatgcaaaaacatggaaagcaatggataatatgattggcgaagtttcttctgaacagaagtttcaatttgacatggaaacagtgaaatcttttgggagcatgcaagtagaatcctttggtgtatctcatgacgcgattgagccgatgttttacatatttcataaggggaataaaaaatttgtaatgataaccgacacaggatatgttagtgatcgaatgaaagggcatattgcaggcgctgatgcatacctttttgaaagtaatcatgatgtagagatgcttcgaatgggacgctatccttggaatgtcaaacgtagaattcttggcgacgagggacatgtaagtaatgaagatgcagcaatagcaatgagcgaagtaattacagatcaaacgaaacgaatttatttaggtcatcttagtaaagacaacaatatgaaagaactagcgcggatgagcgtaacgcaaacgcttatttcagaaggaatcgatgttggtggcaagctagagatttttgataccgatcctgataacgctacgtctatcttcactatctaagtttcaccatttttttaaagctttttcattgttttttcatatttgcggtttactatggaagtatataaatgcgaaatttgcagagaggaaggaagacatggacgagaaagaaaaaaatttaaatgaaaacagcgagaacgagagcacgccaaaaagagaggtcgaggagactttacatacaaaagatagctcgcaaccagtccaagaaactcctatagtagaaggcgtgacaccagaaggagagcaatttgccggagcaacagaagaagctgctgaggcaagctctaccaatgcattttttgaggaagcaagcagtaaagagcctgaaccagctagaccagctccaggaccaagacgtcctagtggtgcaggtggcggcacgattccaccgaatagagtgaataacggcggcggtggcagcgggaatcagcctccgaaacgcaacaaacacttacttggatactttttaactgcacttattggcgttattattggcggacttattatattcttcgtagcatgggataacggcgataacgcagatacaacttctaactcaaataataaaccgactaaagtagaaaaagtttctgtaaataccacctctgatgtaactaaagcggttgataaagtacaagatgccgtagttagtgtactgaattaccagtcatcttcatctttagacggaacaacaagttctgaaaaagaagcttcatcaggttcaggtgttatttataaaaaagcaaatggaaaagcatatatcgtgacgaataatcacgtggtagctgatgcgaataaattagaagtaacatttacaaacggtaaaaaatcagaagcaaaattactaggaacagacgaatggaacgatttagctgtccttgaaattgatgataaaaatgtcagcacagttgctacgtttggcgattctgattcattaaaacttggtgagccagcgattgcgattggtagcccacttggaactgaattttccggttctgtaacacaaggtattatttccggtttaaaccgtgctgtaccagttgatacaaacggcgacggaacagaagactgggaagcagatgttatccaaacagatgcagcaattaacccaggtaacagtggtggagctttaatcaatattgaaggacaagtaatcggtattaactcgatgaaaatttcaatggaaaatgtagaaggtattagctttgcgattccaagtaacactgtagagccaatcatcgaacaacttgaaactaaaggcgaagtagagcgtccttctctaggcgtttcattacgtgatgttgatacaattccagaaacacaacaaaaaaatatcttgaaattaccagatagcgtagattacggtgcaatggtacaacaagtagtatctggctcagcagcagacaaagcaggacttaaacaatatgatgttattgttgaactaaacggtgaaaaagtaactaactccatgacacttcgcaaaatattatatggcaacgatgtgaaaattggcgataaagtcaaagtgaaatactaccgtgacggtaaagagcaatcaacagacattaaattagaagcagcaaaaacaacaacatgataactaaaaccatcctcttaaaaaagagggtggtttttttctgtggaaaacttgtggatagtgatttttttcagatatagatatggtagagaacaagaattcggctactaaatataggcggttattgtggatatgtggataacttctgtggataacctgtgtgtaagcagtgaatatcttgtggaaaagaacaattttgataattaaatcaataaactcagatttatttttgaaaaaaacacattttttgcgaaaatataggtcaaaaagcaaaaatgtggatagaaagccatttatccacaattgaaagataaataaggcgaaaatgtgaaagcgaaaacaactttattaaatatataaatcgatgagagtgattgtggcacagttggttagcttgttttcaaaatgtactttcgatacaaaataacaagtatttttgcttgtggataagctgtggatagtgaaaatggggtatcatatatattgtatggaatatacgttcggacacaaaatagagaatcggcttgtggatatgtggatagtttttgtggataagttgtgtataagggcgggataacctgtggagtaagtttttttgtggtaatttcttttttcattttggctagtgttgcgggtgctctttgaggtatgataaaagtattaataaagatgagggtgacgtaaatgaatatccaaattgtgacagtcggtaaattaaaagaaaaatatctagtccaggggattgctgaatatttaaagcgactgagcgcatatgctaaagtgtcaattgtcgaagttccagatgaaaaggcaccagaagtgttgagtgatgcggaaatgaaacaagtgaaggataaagaaggtgtgcggattttagcgaagattccggatgatgcccacgtgatagcgctggcgattgatgggaaaatgaagtcgagtgaggaatttgcagcggatttggataaactggcgacttatggtaagagtaaggtggcgtttgtgattggtggatcgctggggcttagtgaggctgttttgaagcggagtaatgagcagatttcgtttgggaggttaacgctgccgcaccagttgatgaggttggtgcttgtggagcaggtttaccgggcgtttcggattgttcggggggagccttatcataaatagctagccgcttgaaaggggtgtaatcaacaacttaacttttgaaagctggtttacttttttcgataagccatttttcaccatttgaaattgtatgatctgcatgataaattaatgtttttcgaagtgctgcatattctgtgggtaatgtttcatagtttagaaaatgatagtttagtgcgatgctttcgggaataattccaacgccaagttcattattgcagatttcgacaagtgtttctggaatattgatctctgatatggagacatttgggatattaaaatcattaatgagagcagccagggcgcggtatgaataacattgtttgctgaagacgtataatcgttcttccgctaatattttttggactgattttccagctgtgttgcctgcgaaaactagtttatcccatgagagcgtttgtgagatgatttggctatcttgaaataaattttctttttcgagttcagcgacataagcgatggttagttctctgttagctatttttggtattaattcacttgtacttccgctaacgatagataattttttatttggaaactgttgatagaactctttaatgattgtgttaaattccataggcaaagaagattgcgtaataccgattgagatcgtttcttcttcattattgataatatcaatcgtttcctcccataatagaatcatttttttgaattgttgatagattttttcgccctctttagttagttccacaccattcgagtgccggaagaaaagttgagtttggaactgtttttcgatattttttattttattggacatattagactgtaaatgatgcagttcattcgctgctgcagaaatactctttagttcagctactttattaaatgctttcatgttttcaatatccataatttgctccttttgatatcaaaaataatgataccggcatatgatttacgcatttcaaatgatggcacagatagattatactttatttacagtacaaattcaaatggggggttatgttatgaatacaaccattcaacaattagttaaacatgtttcagtaagagaatttaaaaatgaaagattatcagatgaaaccaaacaacatttattaacagctgcgagaagtgcctctagttcgcattttgtgcaatctttttctattttagaaatcacagatgaaaagctaagaaaggaactagctgaaattacgaatagtgcttcttatgtaaaccaaacggggaccttttatgtgtttgtaggtgatttataccgacaatcaaaacttttactggagaataatcgaactttggatgggttgagaaatatggaatcattactcgtctcggtgatagatgcaacgattgcagctcaaaatatggttattgctgctgagtctcttgatttaggaatttgctatatcggtggaataagaaatgatattgaaaaagtagctgaattgctaaacttaccaccatttacgatacctgttttcggattaactgtaggggttccggtatataaaaatcaagtaaaaccacggctattactagaaaatcaagtaggtgaaaatcagtacccatatgaacaatttacagatttaaaagcgtatgaggaattgaccaaagattattatgctttacgtgaaaaaaatcagcatcaaacttcatggggagacaagaatgtagagttttttgaagaaatacgaagaccagaaatagcgggatttttgaaaaaacaagggtttacactggattaattaattttcgttgtagggtgtataaaaaataataggattaaatttatgaaaagctggaagagtattttttccggctttttatttgatttgggctattatttagtgatagaaagcttaaactagattagattgggatagatttgtataattaatagggaatttaaattgcactattttatcctaaataaatttcataaaaggaggattcaaatgaaatttctaaaaaaatacgggttttactttttattactcggcgttttgagtgattttctaacgccttacatacttggaatcttttacccagaattaaaccaaatgacgcgggttatgagtgtgtttggggatgtggctagtccggtgcggggagcgtttttggtttggtcggtggtgtctggggtgttctttgtgctcgcttttccggcgatttatcagagcgttgttaaaacttcgcggactttggcgattttgcttgcttctgcgattggtttgtatgggattggcgattgtatttttaccgggttgtttagtattgatacggagcaggcgagttggacgttttcgacttgggttcataatattggctcggggcttggttatgcgggatttttgatttttccgttgtttctggtcattctttaccggaaaactggcgataagacccgcagcaatatctatctagttttactcattgttagtttgctgtcggccggtgtttatgggcttgcgcggattcctgctgtgaatgacttgccggttttagataaaattggattttgtcagcgaattagtttcttctttaattatttgccgattgttgtttttggaattgatcggattagaaaaccctagattgtttaagaatctagggttttttgttcgcaaagttcgataaattgctggaaatcttcttgtttggctaatttttttacaaagctgcgttcgtttaagatggttacgagttggccgaataattcttcaaaagagttgtcgcgttcttctttcatggtgagcaggaggacgagtttgacgcgatttccaccccagtcgattggtttatcaagtgcgcatactgcgacggcatttttctttgcgcttcgctggatggcgtgcgggattgcgtagtagtttccgtagcatgtgctagataattgttctcgttcgaacacttttgaaacatagtcggagtcgcagtagtcgaatgcagttaactgttcgcaaagaaacgtaattacttcttcttttgatttgaagttttgttttgggaagaaaagctcttttttgaaaaattttctagaaatcgaatcggcttttggcttagtttctaaaatatgcttgattttctgcaaatctgcttcggttaaaagtaaatcgtaatgatagactgggatgtcggttgttaagtgtaatggttcggcggtaataattaaatggatttctttgtctaaggtgaattgttttatgtcgaaaatggattgggaaacgagtaaatcaatcgaaaaatcaggtattttctttagttgattatgaattaagcgttgactgcctgcgccgtatggggtaactaagagtatctttctctttttgccgtgattaattgtttctgaagcggacagaaagtgtaacgcaatataagcgatttcgtcatctgggaaagtgattgcaagctctttttgaataaaggcagaggcataaacactgacgttataaataaatgggaacttgttttttaattcttcggtgagtgggttggttaaatattgtttgtgattggctcttttgtaaagggctgaaatgtgggccactagataggtggctattttttcgtcagctgaaaagtcgatatggaaattttggtccactgcttcaaggagccgagtgacaacgctgccaaaaacttttgcgtcaatggtggaagttgtcgctagtttgccagaatatagccgggcgatatagcttagttcttgggttggaatatcgatgtgcagttcttcttctaacgtttcggttaggtgctctgccatttcaaggctagttttatcttgctctagtaaagcggttcgctctatatagctgcccatactaatgcgctcaattaaaacggcgatatgcaaaatgaacgaaatcgtcgaaaaatcattcatgaaaaattcgttctttttgtggtaggcaataataagctcggaaagttgttttagattgcaataatcgaagtaatcggcgtatttatctaggcttaattgatggttttcgatttcctgattgaggaatagattgaagatgcagcgcttttcttcttcgccgccctcggttattagttcgttgttttttcgaataatacatagcgactcatctttttcagcgataaccgcgttaagctctttaataatacgagctaacgtcgattcgctaatgaaaaattgatctgctaaatcatagaaattggtatgatcttgttcgattatatggcgtaataattcaaaatgtaagttttcgttatttttggatagattcatttgtgaaagttgctcatttggtgttaaaaaatagccttttccagcttttgatgcaatgattgtggaactaaatgactggttaatttgaataatgtcatttcgcacagttttggaagaaacgcctaacatttctgaaagtgcttttgctgttactgtcctttggctgtcgttaagcttttctaacaatgaacgttgcctttctgaaatagtcattatatccccccctaattctcccttaacctattgttattatacaacaccaaatagagaaagagacgagttttttgtcccaatctctatttaagtggctatcaattagcagcgatgttctcttcttcggcttctttttctaaagcaacgagatttttctcatatacttttaggaatgggtagtacattagaccgtttaggaaaatcaggatgaatacgagaacgatggctcgccagtccatggtggatagaaatgctccaattggcgcgggcatttgccaagagaagacggcgaacgtttttccgacaatcccgaaatacatacaaagataagtgatgacaccgttgaatacggatgtgaaaatgaacgggaagaagaaaattggattcagcattaatggtgttccgaaaatcagtggctcagaaattccgaatatggaaggtaagaagccgactttcccgacggtgcttagttgtttggatttggatcgcatcattaaaaaggcaagtgcgagaacggaaccagaaccaccaatgataacgaaatacgtccagaacggtgtcgtgaaaatattcgtcaaatcttggccagccattttttcagcggcgttgattgaaaggtttccgtcacgaattgggcctagaattccggcaagtgcggcatcgtgcacaccgaagaaccagaataggtgaactaggaaaatacttagaatcgtgaatggtaagctatcggctgctttgaagctcggtgccattttttcatataagaattggatggcagttgtgtctagcaggttgaaaatgataaagataatcgagaaaaaggtcattaaaataataccaggaactagggctgcgaatgtctcagatagtgaggctgggacgctatcgggcatggttattcgaccgacatttttcttgcgcatccagtgataaccttctacggtaacgatggcgacgaaaatcgaaagtaatattccgcgtccgtcaaggaaactaatgtcgacttctttgccgtcccaacccattttgattggattaagtacgagcataaagaaaccggcgatagaaaacataagtgggcgtaagaaatcttcgtggtagtgcttgcataaataatacgtgataccgacgcaaatatataacgacatggcgccaagtgtgattccactaatccagtttaagattaaatcatatttttcagcgaagttagcccaggcaagcaggaagccgtttttcgtatcatctgtgactggagccgctttcaaaataatcggaattgaaccaaacaatgtaattggcagcatggacataaaggcatctctggttgctttcaaatggcgttgctggctaagtttgttagccagcggggaaatatattgatccattttttcgctaatggtattaaatcgcatgtttttatcctcctattaatttctggatgtcttcgtaaacccctttgccatccatgatgccgtattttactggtgaaatggcatggactgggacgctgacggcctgtttaatttgtggcataaggaaacggatttgagggccgataagaacgaggtcgacaccgtccaaataatcggtatactcggattcgctataagcagtgacgtttaatgtgttgccagaagcggcttcgatttttttcgcaagcattcctgtagacataccagcattacaaactaacatgatatttttcattttcctgctcctttttttaaaattctcttcgtttgatgagttttccctgactttcaatcatttctttgaaccagtagtaggaagcttttggttttctgatttggttgttttcgaaatcaacggcaacaagtccgtaacgcttttcgactccatttttccaagagtaaaggtcgaacggggaccaagcgtagtagccacgaacgtcacaaccagcatcaattgcgttgaaaatggcgttaatatggtcgttcataaaggcgattcggtaggcatcatctacttgtggcactgaaacatcttcgcgaacaccaatgccgttttctgtcacataaagtggtaattgatagcgttcgtaagcctcgattaagccatcttgtaagccttttggataaatttctgtatcccattcggtcgtttcgttggcgggatctttcacttgttcgaaccagtttttgatgagaactttactttcgccttttttaccgctgtggttaaattgtagctgggtttcgccgccagtgtatggtttaacgagcgtgcgcgaatagtaatttaagccgatgaagtcgacagtgttttgtttaattgtttgtagttcgtctgttttcataaagctgatgtcgtgcgattttgctagttcggcaatgagatcgaccgggaattcaccaagtgcggctgtttcgagaatccagttgttgcaatagttatcagcgtagcgcatcgcgattttcgtttcgatactttcatcgacaccgttcaccggcgtgtagctgtgaacaataccaatttgccctggatagccgccttctttaaaagtcttcacgcctaaagcactcgcgtacatcacattataagccgcaatcattgttttttgcgtatcttgatagccgggcggatagttgccgattttatatccgttagcaacaaaccattttggctcgttaaaagtggtccaattggtgattttgtcgccaaagtggtcgtaacaaactttggcataatgctcgaatgcagcacaaacgtcgtgatccaaccagccaccagtttcttcccaatattgcggcaaatcccaatgataaagtgtcacaaacggctcaatatcatattttttacacgtatctagcaagttttgataaaattcgatcccttttaagttgatgtcaccttgtctatttttaataattcgcggccaagataaggaaaaacgatacgaattttgtccgccttctttcatcatccgaatgtcttcctcatagcggtggtagtggtcgctcgccacatcgccattctcaagacccgcttcgtgcaagtagtagtcccacatcgattctgccttgccatccacattccaagcaccttcacattgataagaggccgttgcacctccccataaaaagttattattcattagataaactccatttccattgataaatttctcccagttcccgaatcatttccacggcaatatccgtagaagacaagtgaccctccgcatgaacaagcagtaaatccacctctctcattcggttctctgaagatagttttcgtaaaagttccgcgtgcgctcggtgcgccagtttaatctcatctttcgcttcagtaattttctgagtgaaagcttcgatgttttgctgttttacttctttcagtgcctcaaaagcacaacttttcgcattcccggcgtgtaagatgatcgccatggaatcgagttctgttgttagttcgttgctatctgtcacgtaaagacctccttttgatttgtctttactatagctggaaaaatgggggaggtgaaattattatttgccactttggaagtggaaattggttttgggttggaatttaggggttactaggatatgatgatagttagagagaaaatattacataggagatgaataaatgatgaaaaaaacagtacacggatgggaaataatatctaatttagacgtaagagtataccaagatgaagctggcggggttgcgattttagtagatagagataattttggtgatcaagtgccagtgctattgaattttgatggtgatggagtggatataaaagctctttcgtatttaacaaaaagtgttcgagtttcgctggataagaatgtgcggattgaatggcatgaggattattttgaagagaaaacacaagcaatggagaacatcgaggtggaacgggattaaccgttaattatataaaaaaaggagagcaacaagatgagcaaaaaattagtaagtattatatttttagggatttgtcttttgttagtaggatgtggtaaagatgttgttgatagcaaatttactgggaagtggaagttggaatcggttagtgtaggtacgagtgacgggaagaatttaaaagatactggtatggcaagtaagatgagtgtggatctggacatggatgcagatggtaatgtaacagaattgtatattgatgatgaagttgccataacgaattcttataaattaaaacaaaaagatggcgataaataccaatatgatggtccggtagttagtaaaaaagtatatggttatgaaacagaaagtgaaaaagcgaacgtgcaaaaggtccttaaaatgcttgaagcacaggatggtattgagataacgaaaagtgaacaaaaaggaaatgaataccgcgtggatactaaagaaaaaagagattatgtactttctatggagcttgaaagcgagaatttagttttgaaaaaagtggatgacaaagagaacagtttgattaaggaaacatataagaaaaattaaactataagaaatgggatccgttataaccacctattgttttaaaaaatataaaataaacgcctccattaatttcattttagatgagattagtgggggtgtttatgatagaagtcctttttttattttatctgagatagtgaatttaaaaatatgcttgtttacgaaatatatgaaactgataagtaaataggttccgccgaaaataagaagaaagatagaactatttaaactatgactactaaaataaccaaataataatgctcctatcggtaatgtggctacacttaggctataaagagcgctgaaaactttgcccaaatgttctttttgaattaatacttggaaaaaaggtttttggacaacatgggtgactcctaaaaaagtacttgcaatcccccagataagaataataagggaagaatttacaaaataagagcttattaacattgttagcccaaacatgagtgtgcataaagttagtacttttccgatttccatgaatttcagtaataaggtggctaggagagttgagccaatcaatgttccaatggccattgttgatgtcaatagtccaagcacaatggcacttccttgctcttttgcaattaacacttggtagacattcaatccgccgaacataaaatttgccatgcctccaccgatagcgataaataaaatggttttattttgaaatagttcaatgaagcctttaaatacattttttaagaaaggttcaggttctttattatttgcatctgtaggttcttttatttttgaaaaagaaaatattgcgaataagaaggtaaatatattggcaactaaaagggtgattgttgaaaaaatattgattaagaatcctgttagagcattaaataaatattcagtaccattataagcaacagacatgtatgattgagcacttgctagctgttctttttttatgataaacggagtcattgcgtcttgtatagtatatgtattcataccaaaaagggaagctaaaaatgctaaaacacataataaaagaggactttgaaaatccaacaaaatactgataaccataattaaaatcgcaaataattgcccgaattcgcataaaagtaaggatcttttcttggaatgtgtatctatccagtgaccaaataaaaaggaaaaaatgttaggtataaaaatagcaaaattaactactcctacccaaaacgaattattagtgagtgttaaaatataccaagataatacaatgtaatacatgctatccccggcattactgattaaacgacctaaccataaatatctaaaatttttgttttttaacatgtgtccagtccttttgtgttttataatatgttgtacttctaatttagcggttataattagaattgtcaaaatttttattataataatgttggaggagattgataggagaagttgcgggagaggatttgttgagtctataataaactaaaagctgaagattataagatatattgggtatataattgttatacaatcaatcaagtatatcgtaaaaggagtgaaccaaaatgacaaacacactaaaaaccagctaccaaaaaacaccttataaactaggcggaaacggtccgcgcaatgttggtgttcttacagaagcacttcaaaatattgatgataactcagaaagcgatatttacggaaatggtgcagttattgaaaactttgaaacaaaaattgcgaaaattctcgggaaacaatctgcggtgtttttcccaagtgggacgatggctcagcaaattgcgttgagaatttgggctgaccggaaagagaatcggtgcgtggcatatcatcctctctctcatttggagattcatgagcaagatgggctaaaagaattgcaacaaatcacgccaatattacttggaacagcgaatcgacttttgacaattgacgatattaaaagtcttcgcgagccagtttctagcgtgcttatcgaacttcctcaacgagaaattggtggacagcttccttcttttgaagagcttgaggagatttcggagtattgccatgaacagggtatttcgttgcatctggacggggctcggttatgggaaatcatgccgttttatcagaagtctgcggaagatatttgttcactgtttgatagcgtgtatgtgtcgttttacaaagggattggcgggattgctggggcgattttggctgggaatgctgattttgtgcaagaggcgaaaatctggaaacgacggtatggtggagatttgattagtctgtatccatatattttgtccgcggattactattttgaaaaacgaattgggaaaatggcggaatattttgaggcggcgaaaggattggctgagcgatttaattcgtgtccaggcttgaagactgtgccggaagtgccgatttctaatatgtttcatgtttattttgagaagtcggctgatgaggttgggacgattttgacgaagattcaggatgaaactggggttgggatttcggggtatttgcaggagaaatcggcggatgtttgtgcgtttgaggtttcggttggggatgcgtttgcggagataccgacaaaagatttagaatcagcttttgaatgtttggaaaaggaacttagactataaatttggatatgaaaagacaagctattttctatagtagcttgtcttttttagtatgaattatattttatttcgagtgattacttgatcttcataagattttagttcggatagaatttcatcaattgtcttagttttttcttttggcatttctaaggatgtctcttctttttctataatttcatcataaccttttcttggttcttgaaacattttatcaagttcttcagagctactaaaaattttcacatcttttccagcagtaaaactcaaatttttatcattatttatgtatccatcaatacttattccaataggattaaattcttcattggtgaaagtaactgtattaaaatctggaatattgtgtttaaggtacagtgtaactttttctttttgctcattaaaaaaagcttgatcttttttttcttgctcttgatgctgcatataaagataacctcctactatagataatattgtgacaattagcacaataactagtataataattttagttcgttttgacatagaagacctccagagatgaaaggatgattgaattggctacgaaaaaaacttttactgatgaaacttatttcaagctttctgaagcggtgtatcaagatggtacattaaatagtaaaaaaattaatattgaattaagtgatagaacaaaaagtaattggaaagtagtgtcaaaattaaatgatagagctactaacacacaagcttttgcagttattccagaagaaaaaggaaaagatggtaaaatctattataaccataataacatgatttttgtctatcgcggaacaaaagagtcaaaagattttggcagtgatattattaatgtatttgcagggagaaattctagaactagtttagatagaaaatcaaaaaatcctttccaagtctctaaagaatggacagaagaggtattaaaagaatttaatcctaaaaatcctacttctactggacatagtttaggcggagcgctatcgcattataattcaattttatacgattttaatgcgactacatacgcagctcctaatatttatcaattattacctgaagataagcaaaagaaagttcgtgatggcttttataataattcaattattgatttcactcatgatgatgacatgattggaacttttgatcaatttagttcacctattataggttcccaatatatagcagaacgaaataacgtcaaagttggagccaaagggctttttggagctattccaggacattataatgagacatttgaaggctgtttttctagcgatgggacgatgaagttaaaagtagatgtagattctattattaaacatgctcaagacattgatgatattattcagtcactacaaacgaataatgctgacttagagaaccttgaagaaaaactacaaataggttccaagaaaatacaaaatcaattagaggaagaaataagaattggtggagcttatagtgaattgactacctgggatatagatgatgttttaacagaactatgcacaaaatataaaaatggagtttattgcttttataatccgaatgagtttgaaaaatattatgaaatgaatcatcagacacgtagactattgaaaaattttcaaatagagcttattgatgcagcgcagtcttttcgagaaacagatacgcgtttaggaaaatggatttctaataacaattaaaagggagtgattatatgtatggcaatacttatcaacgtgaatacgcccgtgcaattgggaacacatcttatgatttgaactatcaacttcaaattattgagcgagaactcaagaaaaaagatttaactgccaaagaacgttcgaatttacttgcagcagaaagtactttgaaaaaacaagttcaattgaaaatcttaaagctagatgcaaaaaaatcagtagaaaaactaactcagcaaactagagaagaaatagctataattcaaaaagtaaatgaaaaaattggagatgaattagattttattcaagataaattagcggatgcatttgaatcaagaactgcaaaagctgttcaaagttggatgaagcatattcgggaagaagaattggaagagcaaaaagaggttcttgttatttgtaaagaaagtatcagaatggattaatatagcgacgaaaattaaacgaagtctattcttgtgggccaatacatgaacgtgtgttggttttttcgcatattcaaaagttgatttttagtttatttatgtattatttcacttaatttgacaaaaagtatgtttttatatctttttgatgctattttcaatgatcaaatgtaaataattagtcacatttagattcattatttctactataatagaactaggaagataaatttaaaataaagaatttatgggggatggaagtatgagcattattaatagtaattttagaagtttaggttcatacataatggagaatgtttataaaatacctgattatcaaagggaatattcatgggacgaaactgagttagaagacttatggatggatttaagtcaaatcataaatggagaaactgaaagtcattttttggggcaaattgtaatacacatagataaaaaagtagatgaaaagcttattattgatggacaacaaagaacaagtacgtccgttattttgttagcagcaatgagagatttatttataaaaatacatgattgtggttgggaagatgcacgttttgacgcagaagatattactacaaaatttattggtcgatatacgcaaactagggatgaacgtaaattaatacttggcgagaatgataaagagtatttttcaaatagaattcaatttatgacaccagaaataaaaaagaagcaaaagttaactaactcacaaaaaagaatagattttgcttatgactatttttataaaaaactagaaaaatccatggactcagctgaaactttggagaataaatatacagttttaaaagagttttttagtacttttacagaaaaatgctctgttatgtttgtagaaacagatgacataaatgaagcttttattatttttgagacattgaatgctagaggaagagatttagagacagctgatttattgaagaatcatttgtttagagttgcgaataagaaaattgatgttgtaaaagaagaatggaaacaaatgttagaatttcttggaaagattgatactactaaatatatccggcatttttggaattcccaaaatttatttattagagaaaaagatttgtataaagtaataaggaaaaaaataacaacaccattagaagctaataattttatgaaagacttactgaaactatctgaagtatatagtggcatggttaatccagcagaagataatttctttgatacgaatattcaaaaagtattagctgatataaatatacttggagctaaatcgttttatcctataatattagcgatggtgaagaaaggttatgattttaaagagatatacgatgttctctcatgtatagaagttttagtggtaagaaatttcgtggtttcaggattagttgcaaataaatatgaaatagagttttcgaaaattgcttttagaatttatcaagaagatattgaagattttgctgagattatgagtttattacggagaaatattgtagcagataatgattttttacataatttttccagttttgagatcaaaaataagcctagtataagatacattttgaaaaagattaatgatagttactcgaaggaacttactgtgttagatgataataataaagttcatattgaacatataatgcctgtaaaagcgactgattgggacattatcaaagaagatcatggtgagtatttatggaagctgggcaatcttactttacttggtggggaatataataaaaaatctaccaataaaatatttaatgagaaaaaagaagtatatgagtattcgcaagtacagttgacgagagagctattggactacgaggaatggaatataaaaacaattaaagaaagacaacaaagtttggctgagatagcggttaatatttggaagatttaatttaactattagaagattgcacatgtcaggagatgaaaagcagcgttggaattatcaataaatattctaaatattattgggattcttttagaaataggagtttcaatatatattattatttcagaaaagaagaagagcaagaatcgaaatagtgaagctgaaaatgatttgattcaacaaacgaataatattataaataatacgcaaggagataatgcgtcatttaattatactaacgttcttatgcaatcaaaatatcaagaaagagcgtatcgagaaatattaaatgatttaggagataaaaaagaaaacaagcagaaatctaaatatggaaaaaagtgttcatatttaagaaaagttattaatattgtctgtttgggaataggtggtttttgggcattttattattttgatttaatgaaaataacatctttcaatacctatctattaaatgtgttatttcaaaccatttatacattagccacttttattttgattttttcactttccaattttgttaaattatttctaattcattttaaagagtataattatatagttttacggaaaatccagttattcttaacaactctttttgcactgctaggtgctactatttggctatattttgattggagagcgaatttcagaccattatttaatatgtacactgaaagttcgtattatactttaggtattataatgcttggattagtattttatgtattccatcaaatggcacaaagttttttattaaataatatttgggttcctaaaaaagcagttaaaatattatttgtatctttaatttttagtttaatagcatctatttgtttatttatatgaattatagatatactaaaattaatagtatttgaatatcagcatttattattaaaataggaaaggagacccacccatgccaaaactaatcatcgacgcagacgatttcggtctatccaaagccatcaaccacggcatcatcgaaagctacaaaaccggcatcaccacatccactttactcatgccaaacctagaaactgccgagcacgcaatcgctctcgcaaaagaccacccagacctattcatcgggcaacacacaaacttcctgctcgggaaaccatgcgcgaacccggcggaaatcccgtcacttgtcgacgaaaatggggaattccatcgttccaaatattaccgggctaacccagaactgaaattccaatacgaagatgtgcgcacggaaactatcgctcaaatggaacggttcaaagcgctaacgggtcactacccagaacacattgactgccactcaatcggtgatgaaacggttgatcaagctttctttgatattgcgcgtgagttcgggattcacaccactttaaaatacagcggcgataaaaaatggccagatcaggaaggttatttgccaattactaaactgctcgagtcgggcgcactcccttatacaaatggcggagtctcggttgaaaacttcctaaatgatgatttcggattgctgaaactggcaccagatgaaatcgctgagatgcattttgatgtcggttttttggatcaatttgtgttggataattcttcttatacgttgatgcggtgccgtgagcttgcgacgatttgtgacgcgcgggtgcgggattggcttagtgaaaatgggtttgagcttattacatttggggatttacagcggtaaaactctatgttatgatgaacgcaacttaataagaaaaactaggggggccgattctggctgagataggaaggtaatgctttctgaccctttgaacctgtttgttagtgcaagcgtagggaagtgaatgtgaaagtgaccggaaaatttatcgcggctactgtttctttgcttatgctaagggacagtgggcgctttttttattgttcaaaaggaggaatttgaatgtttgttcacggttttcaagaagaagtaggggatttatggcaagaaacgttgcaacatccatttgtgcggagtttggcggatgggacacttgagaaggaggcgttttattattatctactccaggatgattattatttgtcgcattttgagaaggtgattgagaaaagtgtggagcaggctgggacagcggaacttgctacggaaatgagggaagtacaggtgcggcttcagcagtcggaattgttgatgcgcgaacagttttatccgcgggttgggctaacggagcgcgatttttccgagcgaaaaccggcgccaactgcttatcattatacttctcatctttaccggatggcggattttggcagttttggggtgacaattgcggcgcttttaccgtgttatgcgctttatgctgatatggggaaaatgtacgaaggggcgcggagttcggagccattttatcaagagttgttggatagttatgtggatgaaaattatcaaaaagtggtgttgcagcagaagcggttggtggaacaggcggcgagtatggcggatgcgcgggaacttgctctgatgaagcaggcttttcaaatcagtgtggaaatggaatgggcgttttttgatatggcttataaaaaacaaaattggcgtgggagtgtgaattatgtttgattttatgatgttggaaaaggtgcgggaaaaagggccgttggtacataatattacgaatatcgtggttgcgaatgactcggcgaacggcttgcttgcgattggtgcgtcaccgattatggcttctgcgaaagaggaaatggatgaacttgcgaaaatggcggatgtgctcgtgattaatattgggacgctggacggggagcttgttacagcgatgaaaattgctggacgtgcggcgaatgttgctgggacgccggttgtgcttgatccggtcggtgttggcgcgacttcataccgtcgtaaagtggtgcaagaattattggcagaaattcagtttacggcgattcgtggaaatgcgggagagcttgcggcgattgctggtgaagcttgggaagcgaaaggcgtggatgcgggtgttggttcggcggatgtgctgagcattgctgaaaaagtggcgaacgaatggagcacggttgttattattagcggcgaagtagatgtgatttcggacggaactcgttttgcaaaagtggctaatggtagcgcactgcttccaagaattactggttctggttgtttgctgagtgcggtttgcggtagttttattgccgttcaggatgatgcttttcgagctagtgtcgaagcgtgtgcgagttatgcggtggcttctgagtacgcggaaatcgaattagaaagaaaacttccaggttcatttcgaccgctatttttggatgcgcttgctagttggtcggtcgaaaaaacgcgtgccaaagctaaaattcaagaaagtggtgaacacaaatgattttcccacaagtattaacgatagctggttcagattctggcggcggcgcggggatacaagcggatatcaagacatttcaagagcgcaaaacctttggcatgtccgtcatcacggcaatcacggcacaaaacacgctaggtgtaaaagcagtgcataaaatcccggtagaaatgatccgcgaacagtgcgacgcgattgcagaggattttcaagtaagcgctgtgaaaactggaatgcttgcggatgcagaaattatccgggaagtggcgcggaatatccgtttgcacaacttcccaaatatcgttattgatcccgtgatgattgcaaaaggtggcactgctttgcttgaaaacgaggcgacacaagtgttgaaagatgagcttttgccacttggtacgataattacgccgaacattccagaagccgaagaaattctgggagaaaaaatcacaacaaaggcggaaatcgaacaagctgctaagaaaatttttgatttaggtgtaaaagcggttgttattaaaggtggacatagcgaaatgagcgaggcggctgatttttactatgatggtgaaatgacaaaatggcttacgagcgagcgctttgatacgcctcatacgcacgggacgggttgcactttttcggcatgtattgcggctgaacttgcgaaagggaattcccttttagacagcgtcgtagttgcgaaagagttcatcacgagtgcgattaaatatccgcttggaattggtcacggtcatggtccaaccaaccattttgcttaccgattggaggatgggaaatgagagctgaactagctgtatattttatcgctggaacgcaagacattgtccgtggaacattgccaagcgtgctagaagaagcactgaaagccgggattacttgtttccaatatcgcgaaaaaggagcaggcgcactccaaactgcctccgaaagaaaagaaatggcgctggaatgccaacaattatgcgcaaaatatcaagtgccattcattattaacgatgatgttgccctagccctcgaaatcggcgcggacggcatccatgttgggcaaaacgacgaggaaattcgccaagttatcgcgagttgcgccgggaaaatgaaaatcgggctttcggttcattcggttagtgaagcagaggaggcagaacgacttggctcggtggattatatcggcgtaggaccaattttccccacaatttcaaaagcggatgcagagccagtaagtggaacagcaattttggaagaaattcgtcgggctggaatcaagctgccaattgtcgggattggcggaattaatgaaacaaattcagccgaggttctcacagcaggtgcggatggggtatcggttatttcagcgattactcggtcggaagattgccaatcggttatcaagcaattaaaaaacccaggttccccctcctaaaagggcaaacctgggtttctcatttttataaatcttcaccattggtagcaataacgttcttgtaccaatcaaaacttttcttcttataacgatttagcgtacctgtgccgtcgttgttgcgatcgacatagataaagccgtaacgtttcttcatttcagcagtggaggcactaacaaggtcgatacagccccatgaagtgtaacccatcagctcaacgccgtctttaatcgcttcttttacttgcgataaatgggcgctcaaatagttaatacgatagtcgtcatttactgtgtagttgccgttttcgtcttgttctagttgatcgatagcgccaagaccgttttctacgatgaaaagtggtttttggtatctatcccagaattcgtttaggacaacgcgtaagcctttaggatcgatttgccaaccccattcggatgcttctaggtaagggttttgcacgcctcctaggatgtttcctgcgccagctttgcgtttcgactcgtcagctgtttcagttgtgctcatgtaatagctgaaggaaatgaaatctacagtgtttttaaggatttctaagtcttcttctgttacgtctaattcaatattattttctctgaaatagcgtttcatgtagccaggataagcgccgcgaacatgaacatcagagaagaaatagtttttgcgctctgcttccataacagcaataatatcatctgggttggaagttagcggataagttggcattgctagaaccatacagccgatttgagcttctggcatgatttcgtgaccaatttttgtagccagcgcgctcgccacaagttcgtggtggacagcttggtataggtctttttgtgataatttatctgggcttgtagaaataccgccactcatgaatggtgcgtgtaaaatcgagttgatttcattaaaagtgagccaatattttactttgcctttgtagcgattaaatacagtgcggacatagttttcatagaagtcgatcatttttctatttacccagccgtcgtaagttttcgataagtgaagtggtgtttcatagtgagataaagtgattagcggttcaatattatgtgctagaagttcgtcgaataaatcatcgtaaaattgtagtcctgcttcgtttggctcagtttcatcaccatttgggaagatacgggaccaagcgatggaagtacggaaaaccttgaagcccatttcagcaaaaagtttcacgtcgtctttgtaacgatgataaaagtcgattccttctaattttaagttatctggtgttggaccgtcagtaatttgaccgaatccgccttttggagtaacatcttgaacggaaagtccttttccatcaacgttgtaagcgccttcgaattgatttgcggcagcagctccaccccataaaaagtcggctggaaatcctgtatttgtatgcatgttaaaaactccttttctacattttaaagtatctataaaaaaaaccaaatacttttctaaataaatgcagagaaacattgtacttagaaaaatatttggttatgcccggcttgcgtcggtaacattccgatttataattaaaatatagcaaaaataactaggatagtcaacggaaacagataacatctactctgtttggagcggatgttatttacgtttagaaagagtgagcataccgaataaaatacttgctgtgctcgcggattcgtctgtttttgttgaatttgattgtcttacagaactgacttgctcttgtgctattcctgcgttcagttgttgttctggactggtcacagtatcaatttgcgccagtacgtcattatgggttacttttttcataatatttccacctgtctctgtatttgaacgaacaatagaaattatactattattatagccctaacatgaatttccatttttagtcaccgattccataatgggagtttttatataaaaatagacttttagaagaataactttgcttgaaaagtagcgttttagtgcatttaatgagctgtttatggcaaatgtattgtattgtttttttggggaagaacataaggaatgatatagcgacaattgtttgttagtgagtataagagggaaaaaggtagattgaatgataaggatttgtaaaaaaatgtatagagggggagttagcgtgggatcagcgttttcagctattttgtcaccggcagtggggattttgattagtccatttccaattgttgggcttattttgattttactgagcaacaaggcacggattaacagtattttttatacggttggttggattgttgggaatattgctattttctttattgggttatttttaatgagttcggcggttagttcgtccggagatcagtcaaccttggtcaaagtggtacttattgtgttaggggttttacttattttgctcggtgcgcatgattttacgaaacgtccaaaaaacggggagaaagctgcaacaccaaaatggtttgaaaaaatgagcaatattaaaccagttggcgcgatgatttttgctttcttattatctgcggtgaatcctaagaatatgttgctttctctgactgcgggtgttagtgttggtgcgctgaatttaactggcgggcaagaaacaacggcaactattatttttggaattatcgcttgttgttcgatttacatcccaacgattgctttcttactggctgggaatcgacttaacaacgcattagatagtacgcgtaaatggcttatccaaaacaattccgtgatcatggctgtactgttcttgtttatcggtctaagtgttattagtaaggcattttaaatgataaaagggctacttgttctcaaggattagtagcttttttttatttaaaaatgcagactgttcacataatgtctacatactatgaaaacgttttatgctaatatggcttcacttgttcatttaaaattgaataagaatacttacaacaaaaaggatgggtttcatgtttgacaaactaatgggaaaagcagcaattgttaccgaatcatcttatggcatagaacgatttttagaagatgatgaaaagattattcaaatttttaaatttataagagatgaagttattattacttcaaaagggatttttaatgtggatgctcaagggataactggtaagaaagtagaattcaagtttttcccgaagaaggcattaaagtatgtttcgatcgagacggcgggaactttagaccgtgactttgacttgaaaattggtgttgatggcaatacggtcgtgacacaaaacacctctttttccgcgccaatcgccttaaaagtgcataaaaatgatacagaaatgggatttgcgctttataaaatgattaaagaaatgttataagtgaaagagaagacgatattcgtcttctcttttttatgtccattctagtgttgcagtcacagggaaatggtcagatgcagaacagccatccacttgatccgtgatagttttgtaagagtgtacgcggaactctttagacacgaagatgtaatcaattttttctaattcgttttcaggtcggagtggttggaagtcatgaaagctaccaattgggccttttataggagtctgagaaatcaactgcgcatcctgatattttttggttatgaagttatacgttggtgtttctggttctgtattgaaatctcctagtaaaatcactggtaaattctctgcaatcagaccggctttttgcagtaaaagttggcttgcaaatagacgagcttcctccgagacgtgatccaaatgcgtattgaagatatagaactgtcttccatcagtcgaatcctctagttttccccaaacgcaaattcgtggaaacatcgctgttgagtgaatagaagggacatctggcgtttctgaaagccaaaaatgcccttcttgcagtaaactaaaacgagcagaattataaaaaacagccgtaaattctcctttttcaaaaccatcatctcgtcctaccccgaaataatcccaatctagcatttctttcatgtcgcgcatttgtggcagaagaggttcctccacccccatgaaatcccattgatatttatcaagtaatgattttgttagtgttttacgcaattcccagctctttttctgctcggaagtgtcatcaaaacgaatgttaaaagtagttacactgaacatgattccacatcctttttttatttaaaagttttacaaagagagtttagcatatttatgaaagcgtttcacttatttgaggttttatgtagtatatattcgacattttttcaaaaaaataaaagtcattgtattgttatgaaaagggagtgtcactatgttgcgaaaaggtagttggttgctcatattattattgatagtattagtggcattatcagcttgcgaagatagggagaaaggagacgctcataatgtctcggctaaaagggaaaagcagattttctcttcaaaagatactaaaaagggatggctagagctcattgcagcagatgaaatttcaagtcaagatgattctccttgtatttataaagcgggggaatctgtagaaaaattggaagtgcatatgaaagaattaagtacggcgagtttgacctatatttacattgacggctacatcgtacaaatggaacaaggcggcgagctctcttttcaaattcaattaagtaaaacagaattaaaaaaaggatttcatgaattaacggctgttcaatatcaggaaaataaccctgaaactaaaaaagtagagttattaaaacgcgctaagtatgaagtaaaataaaaagattaacgaatgagttagaacgatatttttaaagagaatgtgaaaaatgacattctttttttgtgctattaatacttaaaaaaggaagatgacgatattgtaagtagcttttcgcctgtaaaagaattaaactactagtatttagggtatatattttagaacaattattcctaaatggtttggaatagagcaaataaggcataggcatagatactgcattccgactttttgaaatgaaagaacttaattagggggatatcatatgggttcatatggcgaattgattcgggaaatacggctatctaaaggtttgactcaaaaagaggtatacacaggaattatatctaggtcttatgcaatcggatttgaaaaaggtaaacacgagattactttgagtttgtttgaagaaattttaaagcggatcatggttcctctagatgaattcttttttatttacagagacttttcttcgacagaggatgatagtttttggattgatttcgtcgagctatcaggtaaaaatgatgttgtagggatgcaggcgttgctagataaaataactttagagcgaacggagcagtcagaagttagaaaagcgatacttcatacgagaattcaaactattaatcattatttgcgtacgaatgtgtttgatgaatcaaacatttccgatgaatataaaaaaattattcatgactatctttggaaaatgcagacgtggactttagaagaggttcgtattttttccaatagcatatctttttttgaggaagaagtacaaattcacttttatcaaattatgttgaaatcgtatgaaaagtataggtactatgatagaggaagactgctattttgccatctatttgctaatctaacagacgaactcatcatacagaataaaatcaattatgcgaatctagtactcgaaaaattaaaagaagcatctgaaacaagtggtagctttaacagtgctttttatcgaatagtagccaattattatcaaggggctatttggatgaaagaaggcgaagtggaaaagggctatcgccaagccaaaagagcgattcaaacatggaaagaactacgctatgaagcaatagcagatttgtatagtgtggtattaaaacaatttttagaaaaagaaaatattaaagtagaagattagctaccctaagattttctatttaaaaacactaaaatggagtcgttttagtgtttttttgtttgtggtaaagaggttttatgtactatatatagcactatttacagagagaaaacaaaggaatgtaaaataaaagcaagaaatgagtcaagaggaggtcttcgggtgataagttatggtgagctgattcggcaaataaggcagtctaaaaaaatctcccaaaaagaagtgtacacaggggttattagtaaatcttatgcaattgaatttgaaaagggaacccatgcaatatcgagcattttactagagaaaatagtaacaaaactaatggtaagtatggaagagtttttcttcatgtatcatcaagaggagttgcctgagaaagaggacttttgggaagcctacgagcgggcgtgtaaaacggatgaaattgctatttgggaattactttatcaaaaaatatcatcggaagaaggaaaaatcaatcaagtaaaaagcgcggcgataaaacttgaattagaccatataaaaggcaaacaagttatggataaaaaagtggttcggattttggagaactacctgattgaagctgttttttggacgttagaggatatattcttatttactcggatgttgccgtacttgtctttgaaaagtcgggtgccattttattataaattattaaacacgctggacaggtatcgtcattttgaacgaggaagaaggattttacaaacagcgattgctagtattatagatgattttatagagaaaaatgaaatcgagcatatggagctgatgataagaagtttaaaaaagattagtgatgattgtgagggtgcttattttaaaattctctgcatgtattatcatggaattattgagcggggagaaggcgcagaaatcaagcaggcgatagctattttacgggtgttaggttatgagaataaagcgttaaagtatgaagcaatgtatcgacaatttagtttaaaagcaacgatataaaaataatttaaagaaagctaaaaagaaccaatctttttagctttcttttttcgagtagtatatatgcgacattagaaaattttaagactccgcatagtattatatagactgaagtacggcttaaagccacattgacagtgaagggaggggctttggcaaagaaactaaatgccaactgacactgcaaatttagcgttaaaaggaggaagattgttattttaaagaaaatatttattgcattaattgcgcttgtagttattatcaatacagttagttttacggctgtttctgcaagcacacctacatggttagaacaaaccatgaatagtaatgaaccgtttataaaagagattgaaaaagaaactggtaagacgagagcgaatattacacagacagatttagaagctataaccgccttgcgagtaacaggggcaagtgatattccgacaaatatcgatatgttaactcatttaactacgttagaagttaaaagtggaacattatcttctgtatctaactcagtggggaatttaaaagagttaaaaatcttagttctgaatgataataatttaagcacctttccaacgattgttttccaactacctaagttagaagaattacaagtttctgggggaacgatagaagaaatccctgccacaataacaaatatggcgagtcatttgaaattcttagggatattaaataaccatttagtgaaggttccagacgcaattttcactacgaactggacaaatgctactgggggagacttagacttaatggctgcagggaaccagattgtaaccaatattcctgccaactatataagccagtttaataatgggaataacctattagaattttacgataacaactatcaaaaacaagaccaactaactacaacacctggatataccattgatgtacctgttggaactgattttaatcaattaacaccagacaaaacgaaactcgcactaacatctggacgaactttactcgcgcaacacgaattcgagtattatgatgatggttcaagttcactaatccacaatggcgtggcagcagcaccgggtcaagcgaccattttcatcaaaagcaagttttccacgcaatcaaacaaatttgccagaacacaagttacagtaaacatcatcgcgctaaacggcggacctattacagtgaaacatgaagatacgaaaggacaagaacttgcgccacctgtcattttaaatggtaaagacggggacccttatacaacgacacaaaaaactttcccaggctacactttagttgcaacaccagccaatcaaaatggtacattcaccatgaacccggctacagtcaactatgtatacagcgcaaatgattataaactaacctctactttcaaagatgcccaaggtcaagaactgaaagcgccagttgtggatacaaaagattaccatatccaagacaactatactacaacagcagcaaccattcctggctattctttagtttccacacctgctaatcagaacggaacttttggagctgggaatgtcacggttaattatgtatacaaaaaagacgattatacacttacttccacttacaaagatacgaatggtcaagaactaaaagcaccagtggtagatgcgacaacgtatcattatcaagacacgtatacaacaacagccgcagttttcccaggttatacgttagtagcaacgccaacaaacgctactgggacatttggttcgtcaaacatcactgttaattacgtatatcaagcaaatggctatcaattaacttctacatttaaagatcaacaagggaagacaatcgcaccagatgatgtcgatgctaaaacctatcacgtgaacgatccctatacaacaactgccaaaacgatcccgggttacacattagtgacgacccctgcaaacaaccaaggtaattttggaacaagcgatattacggttgattatgtttataaagcagaagattatacattaacttcgacgtacaaagatgcacagggtaaagaattaaaacaacccgttgtagatagtaaaaaatatcatattcaagacaactattctacaagtgcagcagccattccaggttatacgctagtagcgacacctgcgaacgaaacaggaaccttccatacgagcgatgttacggttaattatgtgtataaattaacagacttaaaattaacttcaacatataaagatgcgcaaggaactgagttaaaagcccccgttgtagatagcaaaacgtatcatattcaagataactatgctacaactgcagctgtcattcctggctatacattagtcgcaacaccagcgaatcaatcaggtacttttggtagcacggatatccaagtgaactatgtataccaagcagttgcttataaactaacttcgacgtacaaagatcaacaagggaacgatttagctttaccaaaagtagatacaaaaacgtaccatattcaggatggttacacgacgagtgatattgctattccaggttatacattagtcgcggctccaacgaatcaaacaggtacatttggtgcgagtgatgtaaccgtgaattatgtctacaaagccaatgactacacactaacttcaacatataaagatgcacaaggtaaggaattaaaaacgccagtcatagacagtcaaaaatatcacattaacgacacttatactacgacaggagctactattccaggttacacattagtcgcagcaccagcgaatcaatccggtacatttggcgcggcgaatgtaacagtcaactatgtctacaaagcagatgattacacattaacttcgacctacaaagatgcaaacggcaaagaattaaaagcgccagttgtagacagcaaaacttaccatacaaaagataactattctactagcgcagcaaccattccaggctacacactagtggcagtaccagcaaatcaaacaggtacatttaatacgagcaatgtgacagtcaattatgtttacaaagcgaatgaatataccttaacttccactttcaaaaatgtacaaggaacagaactaaaaccagctatcgtgaaaaaaggatttattattaaggatggctatgcgactagtggcgtaacaattccaggctatacattagtggcaacaccatcgaacaaaaaaggaacgtttggtgctagtaatgtaacagttaattatgtatataaagcgaatggttatgcattaatcacaacatataaagacacacaaggtaaagatttaaaaccactagccattgatacaaaaatatacaatattaacgacccatacactgcaacagcgctaaacatcccaggttacacattaacaactacaccagccaatgaaaaaggtgtatttggcgcaagtgatgaaacagttaattacgtatataaagcaaatgattatacgttaacaactacctacaaagacgcaaacggcaaagaactacaagcacctaaagtagacgcgaaaacttatcatatccaagacacatacaaaacaactgcagcagtaattcctggatatacattagttgcaacacctaagaatgaccaaggtgcttttggagcgaacaatgtaactgtgaattacgtgtaccaaacgaatgattacacgctaacttcgacatttaaagatgctcaaggaaatgaattaaaagctgcagatgtagacgcacaaaaataccatattcatgacacttacacatcgaaagcagccgtgattccgggttacactttagaaaaaacaccaacgaacgaaacgggtacttttaatgcaagtgatattcaagtgaattatgtgtataaagcaaatgattatcaacttacttctacttttaaagatcaacaaggcaacgaaatagcattaccaacagttgatgcaaaaacttatcacattcatgacgcgtatacaacgaaagctcgcttgattccagggtatagcctagtagctgcaccaaagaaccaaataggtgcttttggaacaagtgatgtaacagtcaattatgtgtataaaaaagatgctattatcaaacctattactccagcgaaaccaactattcttacaataaaaacacctgcaagcaaagtaattaagactaaagtagttaagcaaactcttcctaaaacaggggatgacgatgccggactattaaacctactaagacttataggactcgttttaattttaggcgtatttttggcagtcggaagtaaaaaattaagataagcataacgtagattaaaacaccgccgcagattgttgtggtggtgttttaactaatatatccgacattagaaatacccattttggaaaagatgtatgatttttattgtaaagaattttacaaaggaagaggcgattctttgttagagaaaaagtatcaaatccatttacaaaatcattacgatgcaacgagtaggcaagtgcaaaagaaagaaataaaagtcttaaaaaaacgcaaaaatttattaattggggaagttttcccatatcaaatttgtttagaaagcacgatggaatattcaagatttatgttatggtttgaaaaagaagtccaaaaaatcgtgaaagaactttggaatcaacattttattatcaaactaacattatcccaattacatttccgcgaaaccattctctttttagagcatttaaaagattttagtaaacggataacgattgaatttatcggtgaagacacaccagaaattaaaaaacatttttccgtccaagagcaagaagcgttttttatagggaaactaagaatgctaaaaaaatggaaattcattatttctaaacatatcgaaggctgctcagtggaacaaacccttgcttttaccccgtgtctacatgaaataaaatacacgatgagccaacaagcacgaatggaagaaaatattatcgatttgcacatgttcatcgatttttgggaatactgggcaacacataaaaaattgaaattcgtagttgaggtgaaggaggcggattttattacgaagtctttgatgcataaaaaggtccacgtacaatttgagaatgcgtagcggatgaagtggacccgagagtttactattaattaataatgttaagctgtagaaaaagggagaaatcttttttactacagctttttgattgtacattttttgccaataagtaatctacgttatcaacctgaaaagtagatatagaaaaaaccttatcgcgaatgataaggtttttaatcactattagactgtttttttctttcgtttgatgaaaaatagaataccgaagcttaaacaaacaattccagctaatgacaaacttaagctagtaatatcacctgtttttggcaactgcttttcgactactttcacaggttgcttgtctgtacttttcccactgttaacagctgcaccatctttatcgtttccgggactttgctcgttgttaacatctttatcttttggtggagtaggagcggcaggattatctgtacttggttctgctgtcacatacacaataacgtcttttgtaacatctgatcctgccacgcttagagttacaacgtatttaccgggtgtttggaagtctactacgtcagcgaaattgctagtgatggtatctgttgtgggagttacgcttgcatgaatatcttccagaaaggctgcttctgtttttgtagtgccttctttgtaactgatctcgtcatcactagaaatactgatagtttctttgccagtatatggcacagtaactcttccagaaaacacaccatagtcattgctttcgaatgtgtaacttacttcaccgttatctggtaaattttcccacgtaatagttctagtatctgcatcataaactccgccgttttctggtttgatgatggaaacaacattaccatccttatctaacaggtctgtaggaacagcggatacaagtttattattttgtgtggtttgggttggacttactaatgtttgatccattgcttggtacccgccattctcagcagtaagataatctggtaaagaactaatatcttttaactggttattattacatcttacatccaatactgtctctccaacaactagattcgttagttgattattattacaagataaaagtaataaatttatgttttttctaacatctaaattcgttagttgattgtcatcgcaatataaaatctctaaagctagattttgggtagtatctaaattcgttagttgattgttttcacaagataactctattaaagctagattttgatcaatatctatattcttcaacttattgttatcacaagtcaaatactctagagcttggttttggctaacgtctaaattggctaactggttatcagaacaaaccaaagtgtttaaattcggatttttgctaacatctaaatctgtaagttgatttttagtacaaccaagatttgttaaagctggatttctactaacatctaaattggttaactgattgacatcacaagccaaataacgtaaagctgagttattactaacatctagctttgttaactggtttctagggcaatataaatactctaaagctgtattttggctaacatctagttgtgttaattcattgttatcacaagtcaattcttctagagcaagatttttactgacatctatactttttagttgattatcatcaagattaagtatctctagtccagtcaaatattcgattccagtactatcttctataccttggctccgtgcatctaattcagttattttagctaattcctccacagttacagattcatcaacgtttttgttcattttttctgctaccgctttagccaaattattatctggaaagtaatcattataggttttagttccagcttggacaatttggttttttaagttgttagctgtttttttttcttttaagtctgttgcaagcgattggctctcgcttttagtttcgtttccggttgtgctctctgcgtgtaccgttgttatcggaaggctgcttgttacggtggcacttaatgcaattattgtaaaaattttggacagtttcatatttagttactccttcagctgctattgtctttagcccgttcagttatattaatcaagaagtatattagcatgggaagattagattttatatagaaatctcaaaaaaatacaaaataccggacaaatagtgtcgaaattgttacaacttaggtggaattctaatttctgaacaatacttaaaatgatggattcgtggatgaatggttctatgtctttgttttaatcgttttttgaggtaaaaaactagtcggaggatttgtctctgtggagcgcggttttactaatgatagagaagaatttcgcttatttctaaatgaataagtcataataatagtataaatttgttgtgagattgatttgaataagttagatggtagaatgttaaatttttcacttgaaaagctgatttagagctattttccaatgaattgtttcacagaacgctcacaaaagaagtgcgctaccggtgatataatgagggggaaggatatacatagagaggaagcgtacagatgagagaaataaaagtcaacgaaagggccttccagcaacatgcaaccaaatttgcaagtaaaagttcgggaagatacttgccattaaaaaacgggaacatggcatattcgagagccaattcgattgatcaattgcgctcggctttgattgagttggtggatgtcgtggaagatttccaacatgtgaccaaaaaagatgcgagccggcttaagaaaatgggtattgcttatgctaaacaagaccaattgatgggacaaaaaatcaatcagttggaggtgcgttaaatggatagcgcacatagtcagcttgaacaacaactccaacaaattaaaaaagcgaaaataacggcagaaacagatgttgaccaaacgagaagaaaacaaaatgaacaagattggctagaagaggacagcgaccaattaacacaagaaaaacggatgttattagactttttgcgcagtggctggcaaggcgaagaagccagtggttttcatcgttatttagaagagcaacagcacgaagagtccgtggcttggaagaaggatctccaagataaaagaaccgatttagacaaggaactacaagaaaataagaacaggctccacgcactaggaacaaaacaagccaccttgcaaaaggagtggagtaagtgagccggatagatattgcggaattgaatgactttctctacggcttacgaaagagtaacgcggaagctaaaacgatgattaatcagattaaagatgcagcgatggattatgcccaagacaatagtttaaaaggggaagcagttactacatccaaacgatatttttctagcgcctatacaagtatttgccagagcatcatcgaagcactagatgaaagtgaggagcggctcgcgcaatatattcgcgagttcgggagccaagtggatagttcgccttccgctagaattgatgcagaaatcttacaagaagcgatggccaaggttagccagttgcagcgaaaagaagaagatttacaccggcaattgacggcaccgaacacgaagccagatatgcaacaagtctatgcagtgaaatcaagaagcgttcatacccaattgctgaaagccatcgaacaagagaatatcctagaaaaatatttggcttttgaacaaagtcatggcccgttttttaatgcattagccgaactcattcgagcatagattgttagttaaagtttttgtaaaaaaacataaatcgtttggaacagggaaaagaaagcaactacaaagatacttcattcaaattttttaaaataaccaaacatggaaaggagaaaatcacatggattcacataaacaatcaatcccaaaaacacaactttctaaaacaaaaaaacaaactctaaaagtaaccatagatcgccctataggttatactgacaaattcggcaatgtctatccgctgaattatgggtttgtggaaggtatcattggtggtgacggggaagaacaggatgtttatattttatcgagagagatttctgagccgattgaaacgtttcaaggagatttaattgcggtgattactcggaatgatgatgtggaagataaatgggttgtcgcaccgcaaaatgagaatttcaccatagaggaaattagagagaaagtccattttatcgagcaatatttcgattcggaaattaaattgatttagggtgcttttacaagctagacaaataaaaacaggaattctctatttggatgtagaggattcctgttttttacagttcattttaattgcttggaaattgattggtcacatttaaagtgttcattccgccccaaaagccttttgaaagagcgattttctctatctcttttaatacgtttgcttcctcaggatttaaatggattttttcgacgaagcataaggtatggatattttgatagacagaacgagcttctaattcgactgtttgagaggctttttgggctcgggtgatagctgtagtcaaaatttcttgtagccgggacgaattttggttatttaaagaagtatccgcctcaaataaattcttcaattcctcgaataaatctataagtgcctctggagtattctttttcattaaaacgcacctcttttaataaagtatcttactatagaatactcctttttgataattgaatccacctacaactgcttcaatgcaagttccgtcaagttctctacagtaaagccaaatcgttctgccagctcgtctcccgggccagacatcccaaacgaatcaatcgcgaggatttcgcctgcatcaccgaggtatttgtgccagccgtatgaggcgcccatttcagcggcgaagcgttttttcactgcttttggtaaaatggactctttatattcggggctttgtttgtcgaataaatcaaagcttggcatgctgactacgcgtgcgccgaagccttttttagcaagattatctctgacagctgtcattaggtgtacttcggatccagaagcgagtaagataatatctagtttatcaagcggggaatcggctaagatgtaagcaccttttgctagaccggttttcgcttttgctgcgctgtttggtaaaattggcaggttttggcggctaagaacgagcatggttggttgttctttttgagtaaaggcatagcggtatgcttctacggtttcgttgccgtcagctggtcggatgacgtgaagtccaggcatggcgcggaaggatgcgagatgctcgattggttcgtgtgttggaccgtcttcaccgaccgcgatggaatcatgggtcataatgaaggtggatggaatgcccattaaggctgctgaacgaatcgcggaacgtagataatccgagaatacgaagaaggtcgcgccgaatgcttgaactccgccgtgaagcgtcatgccgttgactgctgctcccatcgcaaattcgcggacgccgaacgaaatattcttggcggcatagttacctggagcaaaccgttcgctagcttttaaattggttttgttggaggaagctaaatcagccgcaccgccaaataagttaggcagttttttctctaattcttgaaggacaatccctgatacttcacgagttgcaactggtttgtccgcattttcatcaaagacaggtaattctgcatcccaatctggattcaaattatcatccattaattgttgcaaactttctgcgagtgctggatatttttgtttgtaagcattgaatgtccggagccagctgctttcactcgcgcgacctttagaatgataaaattctttctgattttcgacagtttttggtaattcaaaaggtggcatttgccaatcgtaagcttcttttgctagtttgagttctttttcgccaagtggggagccgtgtgccgctgattttccggcttttccagggctaccataaccgatgaccgttttcacttcgattaaagttgggcgggatttctcggtttttgcaagatggattgctgcatcaagcgcatctaagtcgtttccgtcgtccacacgtagcgtttgccaaccagcagctcggaatctaagctcgatgtcttctgaaaaagactcgtttaaatcgccatccagtgaaatatcgtttgaatcatataaaacaactaattttcccagttttaaatgaccagcaagggaggcagcttcgtaggaaataccttccatcaaacagccgtcaccgcatagcacataggtattgtgatcaacaaccgggaattcaggttggttaaatttggcgccaaggtgagcctcggccattgccatcccaactcccattgcgaaaccttgaccaagaggaccggtagttgcatcgacaccaaccgtatgaccaaattcaggatgaccgggcgttttactgccagtttggcggaagtttttcagctcgctcattggtaaatcataaccaaatagatgtagcaaactataaagcattgccgaaccgtgaccagctgacaagacgaagcgatcgcggttaaaccaagttgggtgttctggattgaattttaaatgatttttccaaagcgagaaagccattggtgcggctcccatcggcaaaccgggatgtccggagttcgctttttcaatcatatccattgataatacgcgaatcgagttaaccatttgttcatcaattctgctcatattaattgccttctttctgactgaacgcttcccaatcttttaaaaatccttcaatacctttatcagtcaaaggatgagaccaaagtttcgggaaaaggcttcctgggatagtcgcgatatgtgctccggcttcagcggcttcttctaaatgcccgatatggcggatacttgctgaaatgatttctgcttttagaccataattatcaagcacttttttcaagtttttaattaaaatcattccgtctgtaccaatatcatctagtcttcctaagaacgggctaatatatgttgcgccagcttttgcagccattaatccttgggaaacagtgaaaataagcgtaacatttgttttaatgccttcagctgtgagggtatggactgcttttaaaccttcttccgtcataggaatttttactactacatttggcgcccattttgctagaattcgagcttcttctaccattttgtctgcttcgaggccgataacttctgcgctaactgggccgtctacgatagaacaaatttctttaattacttcttcaaatggtcgaccttctttagcgatgatggttgggttggttgtcacaccgtccactaaacctagttcgctaattcgttttatttccgatacgcttgctgtgtccaagaaaaatttcattatttactcgctccattctctcagctgaactttaaagctgaatactttatttaatcgtataaccgccgtcgataataaggttttcaccagtaattaggctcgctgcgtcacttactaaaaagagtgcacatgcggcaacttcttctggataaccaaatctaccggctggaattaattttttcatgtcttcgccgacttgacctgcccaagcttttttgcctagttccgtcaagataacggttggggaaatcgcattaacattaatgttgtaaggcgcccattccattgctagcacttgagtcattgaaacaatcgcagctttactagcacagtaggcaacgtgtttatcaagtgcgatgacagaagcttgagaggccatattaacgattttaccgccgccagttgcaatcatttcgcgaccgataatttgcgccattaggaacgaaccttttaagttcagttccattgttttatcccagtattcttctggtaagtcttctgctttttcgagaagcgcgacaccagctgaattggctaaaatatcgatttttggatagacttttttaatttcggcaacgactttttcgatgttttctttcttagtaatgtcgacttgaagtgcgagcgttcttgaagggttaatttgcgctgcgacatcttttacatcttctttaatatcaagcaagacaacataagctcctttttcggaaaaaagctctgccattgctttaccaatcccgcttgctgccccagttaccacggctactttgtctgtaatgttaaaatctttatcaaaacctttaaaagtcatttttcattacctccaataaattttttatctatttttttggtcgatttcttccattaaatctacttttgcttgggaacgtccacctgaaaagtcgctatcaagccatgtatcaagtagcgaaacggcgagggatggcccgataactagggcgcccatggtcataatatgtgcgtcgttactttttcttgcacgttctgctgaatacgaatcatgaatttgtgctgcgcgaatgccgtgaattttgtttgctgtaatggccattccaatacctgtaccgcaaataaggatcccccggtcataatcgttgttttttacttctagtgctactttttcggcgatacttggataaagtactttttcattttcaaaactgccgaaatcagtaaactcaatatttttctcctttaaacgtgtgatgagggtttgttttagttcgtaacccatttcgtcacaaccaattgcgattttcatactaactcatcctttcgttttgctaacaatagaaacaatgtcggcaaaattttgcggtttatggccaaatcttccgacgaataaaccatcgacatttttttgacggacaatttctgcggcgttttctttgctgaccgagccgccgtaaataattcttacgagcgtttcatcgccgcctagttcgcgaataatttcgcgcaaagcttgatgagcgctttcgatgtagtttgtctcagctgaagatgcctttccaattgcccattccggttcataagccagaacaacattttcccactgtgctaaattaattgtctgaaacagcgcctcgatttgtttttttagcgcattttttaattcatttgtatcattcgcatggacttcttcacccacacagacaaccggagtgattttttcgtccaatgcgagtttaatcttcttagctatctcactagttttctcatgaaaaaggtttttgcgttctgcgtgaccaatttcgacatagttcgcgtttagatcaatgatagattctaccgaaaattcaccagttagcgggccggatttctccggcgccatattttgtggaccaaagccaaatgatgtccccgctaaaaggttggcggtcgtttcgagtgtgcccatagaaggaaagataaacgtatccacatcagaaaaattttcaagaagagggatagtcgcttctaaccattcagatgtctgagcccgagtgttaatatagtttttcatattaattccaactaagggtttacgcataaatcagaccgccttttttaaattttctaaaatgacattcattaacatccaagacgattcagagccaggatcaagatgaccgattgctcgttcgccaagtcttagtgcgcgacctttcttagcaataagtgggatagtggactgagcgccagcatgcatagcatctacaaatgcggaaaaagtttcgattggatctgcatttgtatctcgattttgaagaacttccacgccaggcaagaaggcgtccatcatcgttttatcaccaagttcggcttttccgcgatgttgaaccgcagcggccccatttataatcatgccgcaaagctcgtcgaagttaacctccgttttcccaggaacatcagcgccacatttcataaagaaactgccataaagcgggccagatgcgccgccaacttttccaaggagaatcattccggattttttaagtaaggttgcaatatcgggagaaacagtgagtaattcgtctaattgtttgttcacttcacggaagccaatgctgagattgattccgtggtcgccgtctccaatatctgagtccagtccggtcaagtaatcacgttctttttcaattagcgctcccatgtcctgtaaaacgtggccgaaaaaagcgctatccataactaattcgctcatttttattcctccagtagtaatttagtccactttgaaatatggtgtgtcgcacggtgtatccaaaaggtctttcagttcatcgtctaaacgaaccagtgtaatcgacataccaatcatatccatcgaagtcgcgtagttcccaacaagtgggctatgaatgtgtacacctttttctttcaaaatttcatccacgcggcgataacaaatatattggtccatcactggtaaaccgccaagtccattgataagtacatgtacttcttcgccagcagttaatttcatttcttctataagatagcccataatttgatcgactactttatcagctggttcgatggaagtacgtttgattcctggttcaccgtggattcccataccaacttccatttcgccttctttcatttcgaaaatagctttaccagttacaggaagggtagaagaagaaagcgcaacacccatcgagaacgtatttgcattagctttttcagcagcttgtttcaccgcatctaggtcaagtccttttgctgctgcagatgccgctgctttaaatacaattaagtcaccagccacaccgcgacgatcttctacattttcagcagagtaaatatcatctgttacaagtactgtttcaacgcgaataccgtcgtccgcagccatttcagcgcccatatcaaagttcatcacatcgccagcataatttccgtacatatagagacaacctttaccgctatcaacagcttttactgcgttataacaaggctctggagaaggggaggtattaatatttccgactactgccgcatccgcgaaatcttttccaacataaccaaggaaaagtggttcatgaccagaaccgccaccaacgataatccgcacacgaggttcttcgctcatttgtttgcttacgattactcgcttatcattttctgcaaaatctacgtatttcccttgtgccgcaacataaccagctaacatttcttctactgcttcatacccatcattcactaaacgtctcatttttcttcctccttcatatttttataagaatagtgatagtaaaaatccgccaagcacgccgccaactacagctgcagccaaattgactaccgatttagaaaatttaccgcctgttaaaagggaagctgtgaatacaccaataccagctgcaaccgccatatctacccaaactgttccagattgatagatcattgattttggaataccatgattaattgtccaaactgtaccaacgataaatgctgctgccatccaacctccgatagcaccccattcatcaaccattttcccccacatcattcgaatagcaaaagggaataaaaagccacctgcaatcgttgctaatgcaataccaatgctcattatttacactcctttttagactaattgattttcgtttaaacgctcttcttctttaatattcatgccaggttctgttttttcttgttttgcttcatgttttcttgccatatctttttcaattgctgctgctacgattccagctaaaacggctccaatcgcaacaagaccaatcgttggaagcgaacttactaactcgccaccaccacgcataaagacatcacgcataattccgcaaatcccaattccgacagccatatcaacgaacgctgcatcttcatcattttcgattaaaccaacatggtgattcataaaccacattggcccaataataatgaacgctgccagataacctccaaaaataccataattctcggcaagtggagtccaaacactcataacaatcatacctgcgatacaaaaaccaatcattcctctaaagaatttcataataaactcctttcgaaaatagtattgtcatgtaaaaattaatttacattgttcccagttacaaaattgcgttttattacttttttagtgcacgtttgtgagttcttgtaggatagcttctttggatggattaacgagagattgaacagcagcagtaaatgcgccttcaactaatggggcatcaattatcgttgttttttctagaagttcagtatctaataattcaagtgctgtttcggcacttaagatagcgcttccaatatcgcaaaaaatataaatatgttcagaattagtgcaagtcgcgatattatcggctatcatgagtgcatttgtgccaaggcgcccatcgccagttccgccagaagaaataatatgtactgtatctccaaccatttcaacaatcatttcctggaggccttctgtgattttttgactgtgagatactaaaacaatacttatcatttggttgctcctttctgtttttaattgtgtttagttgctatttaaatcctaacatacttgttttttattgtaaagtgttatcttttgttgtgttttataaaatatatttgtgttttgttatttttttgggtaatatgtatatacataaagaaatcattgataggtaaaaggagggcgagcagatgtttccatttgaaagacaaaacaaaattattcatctactagaccaaaataacaaaataactgtaccagaattaagtcgtatcttggatgtctcgattagcaccatccgaaatgatttatctgcattagaagaaagcgggatgataaaaaaagtacacgggggtgcggtacttttaaaaagtgaagagaaatttactaattttaatgaccgaattattcgcaacatcgaagaaaaagaagcgattgcgaaagaagcggcgactttagtaaaaaacaaccaaacgattatccttgacgccagttcaacggcgcttgcactagcaaaagaattacatggtttttcaagactgactgtgattacaagcggactttatacggcaatcgaactaaaagacaacccgaatattagcgttattttaactggcgggattgtaacgacgaactctttcacactggaagggattcttggcgcaaatttaattgaaaatatccacgctgatttatgttttatgtcagctaaaggttttacaatggaagaaggcttaaccgatttcaacatttatgaaaccgaactaaaacgacttcttgcaaaaagaaccaataaactggttgcgcttctagatcatacaaaaatgggagtaatctccaccgcaagcattacaacagcagaaaacatcgatttactaattacggataacaagataaataaagcattatataaaaaattccaagatgcgggacttccggtcaaaattgcggaataaaatagagattgaaactctttgggcgacaattggttcaaagagatttttttgataggagattgaaaatggattatattattacaactgatttaccaaatgcggaggaatttgttaaacttcgagtggatgctggtcttagttttcgatctattgaagtatcacgtcaggctctgttgaagagtgtgtattttgtggggttacgttcgaaaagagacgatgtacttattggaatgggacggctcgttggtgatggaattatgtttatcgtttctgatatagcagtacttccggaatttcaaggtaatggttatggaaaactaattatgacccatattaaaaattacattgattcgaatttagataaaactgcttgtgttacattacttgccgatgtaccagcagatcgtttatacaaacaatttggctttcgggagtcagcaccagcttcaatcggaatgatttaccaaatgaaatgaaaacagcttgagggtgtcctcgagctgtttttttatgtttctgctgataagaaaatgggaactagatactattaaacttttttgtcagggggagcaagatgaaatctaaagggagactgtttttgtacgttgttttggcgttgtcgattgttattggaacgaatgtatttataaaaatagacgcatacgcagccgctgcaccgccagctgcaatcaaccagatttttccagatgatgctttagcgaaagaaattcaaactgcactcggaaagtctagtacagcagaggttgtcacacaaacagatttagatactattaattcattaacccttacatctaaaggaatcagctccatagaaggcatgaactacttgaccaatttaggaactttaattttatcaagtaatcaagtaagcgatatttcgccactgaagggattaactaatttgaccatgcttcagttaagtggaaatccgattagcgacattagcgcacttagtaacttaaaaaacttacaagctctagatattaacgacgcgcaaatcactgacatcacgccactgagcggtttaacaaatctaaagggtttaggcttatataataatcagttggagaaccttagtggagtaaataatttacaacaactccgctccttaaatgttagtaataataagcttacaaacctagatgagctacaagcgctaagcaatttaggcgttctatatgcaaatggaaaccaaattaacaatcttcaggggctgagtactttaaaaaaccttttcttgcttgatttatcaacgaaccaaattgtggatactactccactcgccggcttaaccaatgtacaaacattatacttatcaaacaatcaaattagtgatgtaactggtctttcgagtttaataaatttagattggctcgatataagtcaaaataaaattagtaatattagacctttaaacagtttaacaaagctaacaattattcaaatgaccaatcaattaatcgtaaacgaaccgataagtttcgaaagcaccataactattcctaatttaataaaaaacattgcggaacaaacgattgatccagatacgattagcgatagcggtgtgtatgcgaatggatcagttacgtggaatttacctacttatattccaaaagtcagctatacttttattgaacgtgatacggttgggaatgcaactggtaatttcagtgggactgtagaacaaccattagtgcaatattttaaagcgactttcaatattgaaggacaagaaacaacggaaaatgtcgaaacagggacgctattacaagaaccaccaacaccagtcaaagagggttatacttttaacggatggtatgatgctgaaacaggtggaacaaaatgggattttacagccgatacgatgccagcaaatgatataaccttgtatgcccagtttagtattaatagttataccgcgacttttgatgtagatggcgtcacttctactcaaacggtagactatcaaggtttactagaagagccaccagcaccaactaaggatggttatacatttaaaggttggtatgatgccaaaactggtggaacaaaatgggacttcacaaacaatcaaatgccagcgaaagatataaccttatatgcccagtttagtattaatagttataccgcaacttttgatgtagatggcgttatttctactcaaacggtagattatcaaggtttactagaagagccaccagcaccaactaaggatggttatacatttaaaggttggtatgatgccaaatctggcggaacaaaatgggatttcgcaaacaatcaaatgccagcgaaagacataatcttgtatgcccagtttagtaaagatgcagcttctggtggggacggtggaggaaccgatgaaggcggaggcaactctgaaaatagtacagatggaactactaatacggatactataaaccacatcgtactaccagcaacaggagatcatcgtgtactttttccaatttttattgggacatttcttacgggtttagcactctttacacttagaagaaaataaatgaaaaagcagctgcatgacgcagctgctttttttgaaacttattttttcaattctcgttccatctgcaaacgttgtactttcattgttgcagtgcgcggaatctcatcatatttcatcacaattggctcattcatatgtggtagatcagaaactgcgtcccaccatgcatcccagttcatttctttatcatcatgaacagcgataattggttgcgggcttccgttttcaccgcggataataacgacttcatcgaggaaagtaagcgtatcaagcagtttatcttcaatcgcaagtgtgctatcaatcgtttcgactaaatcaacttgacgatcttgcaagaataagcggccttgctcatctttcataccgtagtcaccgctgtcccaccaaggtccatacacattttcttcaaaacgagcttcttctttgtaataagtaagggcgcgacctttagaaagcatttgaatattaccgctaactcctggcgcaactggattaccgtcttggtccacaatccgaacctcggttaaacctgggacaccaattcccatatcacgcgcatttaatgtttcgatggattgcagtgtatggccacgtaaaatcattggaccacattcactttgcccataaatttgtaagaaaattggttttttatattcagaagtacgaaggaaaaccgccattgtttctttgttaatcgcatcaaatgtagaatgataaaatttaatgctttggaaaacatctggtttttcacgagcaagggaagcccattgtacaaaatggtttggatgggtttcaagcacgtatggtttatattcgcgtagtaccttttcaatatttgttttagatggatttgcgattggtaataatgggaaaccaagagacatcaaggaagacacaccaatattaaaacgagaatggacaggtgaaatatggaaagctacaagccctcttggtttgatgaaattaagaatacgtctttggtatttcgttctccagcccatcgaattcgcagagtgagcgattaattttggcacaccagttgttccagaagtgtgagtcatataagcaatcatatcttttggtaattcctcttgctcacaagtatagccgtctaatggcgctttgaacaattgttcagcattgatcaatcttgagtccggcaaattgtttaactgatggcttttctcagaagtctcagaatcaaaaagcaaccagggttgatcaaggcgattaacaaaaatatcaatagtggatgctggaagatgaggcgaaaccataattggcacagcaccaatataagaaatcgcaactgctaaaatataagaatcaaatttggcagatttataaacgattactttttcttctttacgcacaccgaatctatgtagatgagctgctttttggatgatagcttcttcgcattttttgtaagtggtgtgaagacctaattcaggaaaagtaacaagttcttcatcaaaatggattggcatttctggatagcgttcagcagattttttgaagttggtatagagattaagcggttcatacttttttatcgtcatatggcgatgctcctttaatatttgatgttgttattatatcactttgtcgaaataatgaggagtggttactaaaaacattttcgtcattttaaaaaaatctgtaaattgcttgttttcttaattcaagaaatcctacagataccctataaagaaatctcaattaatgatataatatgttaatataatcacaaactgtttggcagaaggaaaatttttaaaaaaagtggaggtacaaaaaatgaaaaaaaggatagctacaactctcatcatgctactatcacttgcattaatcatcgcaggttgtggcagtaacaacacaagtaaaagtgactcggcgaaaacgaaagaaaaagaaaaaacagaagtaacatcaggggcgtcgaaaacaagttatacagacccatctgaattaaaagataaatacgatattgttatcgttggtgcaggtggcgcgggaatgtcagcagcactagaagcaaaatctaaagggatgaacccagtaattcttgaaaaaatgccacttgcaggcggaaacacaatgaaagcctcttctggtatgaatgcatctgaaactaaattccaaaaagaacaaggaattaatgatagcaatgacaagttttatgaagaaacattaaaaggcggtcacggaacaaacgataaagcaatgcttcgtttcttcgtagataactccgctagtgcaattgattggttagactctatggatattaaattaaacaacttaactatcacaggcggaatgagcgaaaaacgtacccaccgtcctgaagatggctcagcagttggtaaatacttagtagacggtttactaaaaaatgtacaagaacaaaaaattccagtcttcgttaatgcagatgtaaaagaaattacacaaaaagacggaaaagtaactggtgttaaagtaaaattaaacaataaagacgaaaaaacaattagctcgaacgcagtagttgtaacaactggtggttacggtgctaataaagatatgattgaaaaagaacgtccagacttaaaaggatacgtaacaacgaaccaagaaggaagtactggcgacggtattaaaatgattgaaaaacttggcgggacaacagtagatatggaccaaatccaagttcacccaacagttcaacaagataagtcttaccttatcggtgaagctgtccgcggtgaaggtgcgattttagtttctcaagaaggtaaacgttttggaaacgaactagatacacgtgataacgtaactgcttctatcaataaactaccagaaaaatccgcttacctaatattcgattcaggcgtaaaagatcgcgtaaaagctatcgcgcaatacgaagaaatgggctttgttgaagaaggtaaaacaattgatgaattagctagcaaaatcaacgttccaaaagaagaactaacgaaaacattagacacttggaatgcaagcgttaaaaacaaaaaagacgaagcatttggtagaacaactgcaatggataatgatttatccaaagctccatactacgcaatcaaaatcggcccaggaattcattacacaatgggtggcgtaaaaatcaatacaaatacagaagttttagataaagacggtaaaccaatcacaggactatttgctgcaggcgaagtaactggtggcttacacggggaaaaccgtatcggtgggaactctgtcgctgaaatcattatttttggacgtcaagctggcgataaatcagcagaatttgtaaaagcgaagtaaaaatttcttaaccaatagttatgtgattacttaaaaataaaaacttgctaagacgcttaaaatagacgttttagcaagtttttttattggctaagtaaagcgttagtgtagtactatggataggagctaatactaattttaaatcattagtttttaataaggaggaaataatatgttgaaaatgggttttatcggaaatgggaaaagcacgaatagataccatttaccgtttattttagagcgcgataatattgaagtgaagacaatttataatcgaaatcccaaaacagccacatgggacaaaatcgaaggggtacattatacaacagatttagatgagctattaaaagaccctgaaataaagctaattaccatttcaactacacaaagctctcattttgaatatgcaaaaatggtcttggaaaatggcaaaaacgtacttgtcgaaaaaccatttatgatgacttacgacgaagctaaagaaatattcgaactagctaaagaacgcggtttactagtacaatgctaccaaaatcgtcgtttcgattctgatttcctcacagcacaaaaagtgattgaaagcggaaaattaggcgatttattggaagtggaaatgcattatgactatttccgtccagaaatcccagaatccgtccatgaatttaaattctacgatagctatctttatggtcacggctgccacacgattgatcaagttttatcttatttcggaaaaccagacgacattcactacgatgtgcgccaattgctcggcgaaggacgaatgaacgattatttcgaccttgatttatattatggcgtaacaaaagtttctgtaaaatcaagctacttccgcataaaagcccgtccaagctttgtcctatacggcaaaaaaggcatgtttacaaaagaaacaaaagaccgccaagaagaacatttaaaactcttttatatgccaagtaatccggactttgggattgacttaccagaacactacggcacgctaacgtatgtcgatgaagcaggagtttggcacgaggaaaaagttatttccgaagttggcgattatggtcgcgtgtatgacgatttatacgaagcgattattaatggaaaacctaaacaagtaacggacgaagaaaccttgctacaaatggagattttggaaaaaggcgttgaagcttgtaaataatgaaaaattgtctgcgggagcaatctagcggacaatttttttagataaaaatgattggtttcgttcaaataaaccatcaaaacaaccgtaaaaatgaactttttgcataatacacccataatattgaatgaagtcgttcagcgtgatatagtgtaatcaaacaagtgaagcgcttactttgttgagagaggatgtggattatgaatatatcgaatttaattaatgaaaaccgaattatttttgatgatcgtattcaaacaaaacaattattatttgaaaaagcagctgaagtactaggtgaagaagggtctataacaaatccaaaaaaatttatacgtgacttatataaacgagaagaagaaacttccactggaattgaagatggttttggcatccctcatgcaaaaagtaaatatgtaaaagaaccattgattgtttttgttcattctggcattataactgattattttggattagatgattcactgattgaatgtagttttcttattggcgttccgaaaaaagccacagatgtccatttgcaaatattaagtgaactatcaaggaagttaatgaacgaggaatttcgcgaaaaattaaaaaattcaaaaaacgaaactgaaattataacaattttatcgaactaaggaggcgtttcacatgaaaatagttggtgttactgcttgtcccactggtattgctcatacgtatatgtctgccgagaaattaactataacggcagaagcgcttggttacgaagtgaaaatcgagacacaaggagcaaaagtagaaaatgttttaacaaaagaagacatcgcgactgctgattatgtcattttagcagtggataaagaaatagatacatcaagattcgctggaaagaaaattaaaaaagtatccacttccagagcgattaaagaggctgatgtggttattgaagaaactatttcaggcaaagggttaatcaatttagaggcgaaaagttcggatgtaagctctgaacaaccttcaaaagcaagtttatacaatcactttatgaatggtgttaactatatgttgccatttgttatagctggcgggattttaattgccattagttttgcttttgggattgatgcctcaaaccctgactctgattcgtataacgcacttgcagctgcattttctaaaattggtggggatactgcgtttggtttaatggttccagcacttgcagcggggatagcggtttctgttgctggtcgagcaggatttgcgcccggacttgtcgcagggacactggcgactgttggtggatcaggatttctaggcggtatgattggtggtattttggctggttacgtggcgcatttctttgctaataaagtcaatgtcactaaatcacttgcttcgatttatcagttgattgttgtaccgcttttagggattacgattgttggtttggcgatggtatttattattgatacaccaatcgcttgggttttaaatgcgctcacgagttggttaaatggacttggtgagacatccggcgttgtatttggtctactcattggtgtgatgatggcagcagatatgggaggtccaatcaataaatctatttcaaccttttcaattgggttaatgtcagcgggtgtaacggcgccgattgcggcttgtatggctgccggaatggttccaccacttggattagcacttgcaacactattatttaaaaacaaatttacaaaagaagaaaaaacagcggggaattcttgttgggtgttaggtgcatcctatattactgaaggagcaattcctttcgcagttgctgatccgcttcgggttatcccgagtttgatgttaggttctgcaacagcggctgcaatttcgatgggagccggcgttacttcgatggcgcctcacggtggaatttgggtaatgttcattccaaacgttattaaccatctatttatctacttactagcaattgcagcaggtacagtcgtgacagcaatttctgtcggactattaaaaaccccggtaaacaagcgaaaaaataaagaggagatgatataatgttatatacaatgaaagatcttttagcagtaggaaaagaacatcaatttgcggtaccagcatttaatatctgtagttttgatatgttaaaggcgataatggaggaagtggaggcaaataatgctcctgtaattttagaaattcatccggatgaaatagaatatcttggtgataactttgttgcaacagtaagagaatacgcacatagaagtaaggtgccggtcgttattcatatggatcacggtggaacaattaaagatgtgatgcgggctattagaaatggctatacttccgtcatgattgacgcttcaagagccagttatgaagagaatgtcgctttgacaaaacaagtggttgaacttgcgcataaagtcggtgtttctgttgaagcggaacttggaacaatcgggaacaatggttcagcagaaggcggggcggatacaatcatatatactgaccctgaccaagcagaagattttgtacagagaactggcattgatacgttggccgtagctattggaacggcgcatggtttatacccaaaagataaaaaaccagaactgaatatgcctcttttaaaagaattaaataaacgcttggatattccgtttgtacttcatggtggttcaggaaatccagataaagaagtcagtgaatcagtacaatacggcgttaggaaagtaaaccttagttcagatctgaaaagcgtgttttttgaagaggttcgccgcgttttagtggataatcctgcgatgtatgaaccaaatcaagtgtatccatcagctaatgaaaaagtaaaagaagttgtaagacataaattacacattttaaatactactggtcaagcagataaatactaataagaagggtagaagcgctagttatagtgcttttgccctttaaggagtggaggaacatgttaagcacagcaaaagaacggcaactaaaaatcgttaaccggctaaaagtggaacaatttatgcggattattgatttagtggagcttgtcaactacagcgaagccactgttaaacgggatttagtagaattggaaaaagaaggacttgtgagacgaacaagaggcggcgcaatgattatcgataataaaaaaatcgatttgccttatttaatgaaaatgaacgagcggagtaatgaaacgagtaaaataagaattgccgatattgcaaaatcactgattcgcgatgatatggtgattttcttagactcaagctcaacctccctgcatttaatcgacgttttaagtaaatttgatggactgcaaattattacaaacggggtcatgacggcttccatgctatcagaatttacaaatgcaagagttagtattttaggaggctcgattttaacgaagcgatacacggtgaacggcgcaaaagcatacaatgatgccctaacttataatgcggatattgcttttgtttcatgccgcgggatcgactatgacaaaggtgcaaccgaaacacatgaaggtgaagcgctcatcaaacaagctttcaggcgccagtcaagttcgctcgttttacttgttactgaagaaaaagtaggacacaagtttatgcaccaaagcttagcatgtcatgatattgactatttaattacggacttcaaactggactcagatgtagaggaacagttcaaaacccatcaaattacttgtttgtattaattgaaaaatgccttgaaatccacatccgatttcaaagcatttttttcatgttcatttccttatccattcgccgcacagtaaagccagacacaacaatgctaatctcatacagccctatgagcggaatggtaatcatcaaatgcgataagatttctggtggagcgatgaatgcagcgataatcaataagcagaagtaagcatatttccgtgcgcgccgcattccgtttggtgttatcagtgacaacctcgttaacagcataatcaccatcggaagttcaaataatacaccgaatgaaagcacaatttgtagtaaaaattgaaaataagttgcgaggccaatcgtcgtttcaacgccaagttcagccgcgaattggaacataaattttaaaataaatggaaaagtaattacataagaaaaaacgacaccgcataaaaaaagtaaaaaagtaatcggaatatagcgcagggtaattcgttgttcggatgcatgtaagccgggttttacgaaggcccataattgatataaaataaccggaaatactaaaataagcccgataataaatgccatttcaatatagatttgaaaagcatccgtcactttaaaaacgtgtagaataacttcttttggtaagtcatctttttggagaaataaaattaacggcttggaaacgaaaagccccacaaagaaagcgagaaaaaaggatagaagtatgattaataatctggttcgcaattctttcaggtgtccagtgaggctcatggaaacttcagtcacgggcgtgaatcttcttttttagtttcttcttttgaatcatccatcatgccttttgtcgcatttttgaattcgcgaagagtgtctccagcagctctaccaagctctggcagtttttttggtccgaaaatcacaagggcagctccgacaattaaagcgatacttcctggtccgatcatttcgatttcctccattcattggttgaaaatgataatcattatcaactaattctaaatcgaaacctactggatgtcaatctgtttttccgttagcaagtttagtgattacttcttcatcgcgaacgagaatagcttcatgattgctaatcggatgcatttttaaacttttagtatagtcagcaactattttttgcgttatttttttaaacggaatattgttgtagtgcgggagtgtgcagaaatcgactaagtttaaggcatcgtagtttgttaattgttcggctttttttgggctgtccatcgattgaatgtatgcaatattaggtgaggtgataactgctccggctgattcaccgatgtataattttccagcagcaatttcttctaaaattagtttatctgccccagttcgctttaattcctgtaacaaaaagaaggtattgcctccagtaacataaataaaatcattttttctgagtgtcgcagcaatgtggtctaaactttctgtagcaacatcgagttctacgacgaataaccccaacttctccagtgctttcttaccagcttctacataaaaaactacttcttcgactgtgctagcggtcgggataaaagtaacggtttttccttggagattgctttcaaattcagtaaataatggcacaacatctttaaaagacgaggttaaaaataagtttttcattattctagctcctttggtttctagttatagtataatattaaaaggtatcaaatagtgacaccttttaatattgaaaaaagaaaagagatggcgatgaataaatcagaacgactaaatgatatgatgttgtttttaaatgataaaaatacgtttcaattaagcgagataatggcaaaatatggcgtttctcgtagtactgccattcgagatataaagtctttggaagaaataggtatgccgatatattcggaacggggacgaaatggtcattatcaggtgcttcgtaacaggctactttcaccgattgtctttaatatcgatgaggtatttgcgctttatttttcgatgcttacgttaaaggcttatgaaacgacaccttttcatttaagtgtggaaaaattaaaaacgaaatttgaacattgtctttcagctgaaaaaatcgaaatgcttcgaaaaacagaagaagtatttagtctcggctatataaagcataataatcaatgtgaatttctagatattattttgcaatttacgatggaagagaaagtgtgtcagattaattatgataaaaatgggactgaaaaaacgtatattgttcaattttataatatatcttcggcgtatgggcaatggtatgtgacgagttataactttaaggataaacggatgcaggtatttcgctgtgatagaattcttgggctaaaagaaagtgatgcttttgaagccaaaaaattagtggattttaaaagagcagccgaaaatttttataagaaagaagatgcaactaattttgaagtggaaattgcttcaaatggtgttgatttattttttaaagaaaattatccatcaatgaagcttcgacaagagcaagggaaaaattttattcgtggctattataataaaggagaagaacgatttattattaattatttactaggttatggcgataaaataatagccgttcagccagattcattacgcgaaatgctactaaatgagcttggttccttgcaaaatcactttttaaaattatcgttataaaaaacttcgatttcattatcggagtttttttatttggatgaaaacatgaaaaaatttattgacttttttgaacatggagaatatgataatgataatcattttcaattagaaagagaggtggtttgtgtatggggcaaaagcttctaggccgatttatgttgctattaagcgttttagcagtggttttgactatcaattttagtgaaacctttgctgcagaaaagccgaatattgataaaccggtcaaagcattagagcaaactgaaacggcagtggaagcccttgattatcctaaagcgaaggaagcttttcaagaagataaattatggtggtcagaaaataaacaagttgttaaagaaaaatcatatgacttggccggccagatagatcggcaaattgcggaaatatcgcttggaattttaaatagtgataaacagcaagcgatggatgggatcacttcacttcataatttgctcaagacctatcaagagggtacatatacggataacgaaggcaatacaaacattactctatcaagctatattgcaaaactgactgcgacaaagaagctgatagatgagaaagaatgggcaaaagcatcaacccaaattcaagacttaaaaacagagtggcttgcggtggaaggtgatgtggtcagtcaatcgcaagcagcttacgataataccgagcgcgatttaatgttgcttgatgcgtatattaatgatcctactaaacaagccaaaacagcagatgttctagatgggatgacggaggagttaaaaccttttgcagatgtgacttacacttggttcgatgctgcgctaattccatttcgagaaggacttgaagcacttttgattatcgcgacacttcttacttatacaaaaagaacgaagacacgcgcggcgaaaagatggattatcggcgggactgcagctggtttggtggttagtttggcgcttggcatggtcgtggcgttttggctatcagcgcttgcctttggagataataataatttaattaatggttgggctgggctgattgcgagtattatgatgctctatgtcagctactggttacatcgaaattcagatattactcgttggaataactacatggaaggaaaaagtaatcaagcactctccaatggaaaaatgatttcctttgcatttttagcatttttagcgattttgcgggaaggtttagaaacggttgtttttctaattggcatggttgggcggatgtcgaattttgagctgttaatgggaattttggcgggacttggtgtgttgcttattattgcttttgtgatgttgcgatatagcgtacatattcctgtgaagccattctttatgatttctagcgcgattgtgttttacttatgctttaaatttatggggtcaggaattcacagtttgcaacttgctggagtcattccaacatcagtagaagattacttgccatctattccagcgctaagtatttacccatcttggtatagctttttaccacaagtattactcgttatttttggattaattattttaataaaacaaaaaattaaaaaaagagcggattctaaaaaggaattcgcacaagggggaaaatcatgaaaaaatggattattgttatgttgactattttaacagcagtattggttgttggttgcggtggaacaggtacagaagataaggcagaaacaaaaaaggaaacaacaaaagaaagtaaacaagcaaatgcggtcaaaaaagaagtaaaagaaatgaaatcaaacttggatgacgtgaaaaaagccattgcggacaaagacaagagcgcgcttcaatctagtgcagctgaactacataaacattggttagaatttgaaaacaacgtccgtgacttgtatccattacaatatacagatgtcgaaaaatatgaaacaccaattttctatgaatcaaaaaatgatagcccgaattttgataaattaaatgacaatgcgactggacttgacgcatcgctagatacacttgcaaaagccaaagaaacaaaagcaaaaacttccgaagtgcttgataaagcggtagataattattataaatacgtaacagatcaagtagatgaattcgttgcacaaactgaaatcttcacgaatgctgtgaaatctggtgatattgaaaaagcaaaagctacctatgtttcgccacgcttgaattatgaacgcattgaaccaattgcagaaagctttggcgacctagatccaaaaatcgatgcacgtattaacgatgtggaaaatgaagcagactggactggtttccacgttattgaacgcgcgctttgggaaaagaaatcacttgatggcatggacgtttacgcagataaacttttaacagatgcaaaggcgcttcaagcggaagtgaaaaacttgaaattagagccaaaaccaatggtcgcaggtgcgatggaattactgaatgaagccgcaacaacgaagattactggggaagaagaagcgtactctcacacggatttagacgatttaaatgcgaatgtggaaggttcaaaagtagtctaccaagcgattattccagctttaaatgctcaagataaagacttagctgaccaaattgatgcagctttcaacaaaatggaagacacattagcgaactacaaaaatggtgattcattcgtactctatacaacgcttacgaaagaccaaattcgtgaaatcagtgaccaattgagccatctttccgaattaatggcacaaacaggtaaaattttctaagcatagaaaggaaaacgatgacagataagaagagcgataatcaaacggaaaagacagaagtcaaggaaaacaaaggaatgactcggcgtgaaatgctaaaactttctgctgtagctgggaccggtattgccgttggggcaactggtcttggcacgattttaaatgtggtggatcatgtggataaggcgctcactccgaaagaaaaagcggaaacaggtgtaccgttttatgcgacaaatcaagcgggaattattactgcgcaacaaacctattgttacatcgccagttttgatattcaaaccgattcacgtcaaattttgaaagatttatttggaaaatggacaaaatttgcggatttaacggcaagtggcggggttctgcgcgatgtggataatgacatgttaccgccgaacgataccggggaagctgatgggttaggaatttctaacttcacagtgacactaggttatggtccgactttttttgaaaaagatggcaaagatcgatttggtgtaagggcgaaaaagccgaagtatctagaaaaaattccacatatggcgcatgatagtttggatgaagcttattctgatggtgatctttgtatccaagtgtgcgctgatgatcagcaagtcgctttccacggaattcgtaattttattcgtttagcgagcggtgttgctgtagttcgctggattgaagaaggtttcctgagtgcgccaaaaaacgagacgccacgcaatctatttggctttaaagatggaacagcaaacgttgaccatgactcaaacaaaggctacaaagacgtcgtttgggcagaaaatgatgaaccagaatggatgcgaaacggcagctatcttggctaccgcaaaatccaaatgctcatcgaaatctgggatcgttcatccctacttgatcaagaagacacttttggtcggaaaaaagcatctggtgcaccgtatcataaaaaacatgaacacgataaagtcgacccaagcaaactgccagctgattcacacgtacgcctagccaaagacacgaagcaacaaatgcaccgtcgcgcgtattcgtacacaaacggtattgataaaagcacgggaacgattgatgctggattgctattcatctgcttcacccaaaatccgtccaaacaatttctgccaatgctaagtatcatggggaaaatggataaattaaacgaatatactgtcccaattggaagcgcgatgtttgcttgccaaggcggacttgctccgggagaaatttttggagaaaaactactgtagtctaaggttcgcgagccttagactttttttgtataatgaaggtaagtcactgattagaaggagccgattttagtggaggaatgggatttactaaatgagaatcgtgaactaacaaggaaaacacatatccgcggtgaaaaactagcacccggagagcttcatttggttgttcacgtatgtatttttaacgaaaaagggcaacttttaatccaaaagcgtcaaaaagataaagaaggttggccgaattattgggatctttctgcggccggatctgcactaaaaggcgaaacaagtcgacaagctgctgaacgagaagtgaaagaagaactaggcatgacaattgatttaagtaacacccgtgccaaattcagttaccattttgaggcaggatttgatgattattggtttattacgaaagacgttgaactaagcgacttaacattacaaacagaagaagtagcagatgtccgttttgtcaccaaagaaaagttagaagcattaagaagttcgggcgaattcattccttatttctttttaaatcaactttttgaacttaaaaacgccacaactattcacttttaacgaatatagctaaatttccacttaacaaattcgtttcctacacttataatagtacagagacatgagaaaaactccaattagaaagcgagtggtaatatgggccgtaaatgggcaaatattaaagagaaaaaagcgtcaaaagataaaacaaatagtcgtatctatgcgaaatttggaattgaaatatatgtagcggctaaatcaggcgacccagatccacattccaaccaaaaattacgttttgttattgaacgtgcaaaaacatacaatgtgccaaaacatattattgaccgtgcaatcgaaaaagcgaaaggcactggtgatgaaacgtattcagaactgcgctatgaaggctttggtccaaacggctcgatgattatcgttgacgcactgacaaataatgtgaatcgtacagcatccgatgttcgcgcagcttatagcaaaaacggcggaaacatgggcgttagtggctctgttgcgtatatgtttgataatacagctatttttggtgtcgaaggaaaagacgcagatgagctattggaacttttaatggaagcggatattgatgttcgtgacattttagacgaagatggccaagcgattatttatgcagaaccagaagatttccacaaagtacaagaaggtttgaaagcggctggaattgaagaatttacagtagcagaaatcgaaatgattcctcaaaacgatattcaattatcaggtgaggatttagaaaaattcgagaaactaattgatgctttagaagacctagaagacgtgcaaaaagtatatcataacgtcgaattagaagattaacagccaactattacaacaatcggaggaattgataaaatgtcaaaattaccaaattgcccagaatgtaactcagaatatgcctacgaagatcgcggtctattaatttgcccggaatgcggacatgagtggagcgccgtagcagaagaagctaccgaagaaaaagtgttcaaagactcaaacggcaacgtactaacagatggcgattctgtcacagtcatcaaagatcttaaagtaaaaggcgcatcaaacccaatcaaaatgggaacaaaagtaaaaaatatccgcctagtagacggcgaccacgacattgattgcaaaatcgacggcttcggcccaatgaaattaaaatcagaatttgttaagaagatataaaaaaacagcgattctctaattcagagagtcgctgtttttattaattctgcacaaaaaccgtttcaaacacaaacgattcatacgtatggcgcgtaatcgaatattcaaacactcggccatcttccaaatgcgctaatttctcaatttccatcataaaagtaggttcttctaaatcgaggagcttactatcctcttgatttgatttatccccgcgcacccaaacatgggcactctgcatcttgagttttaaatcatcacgaatataattataaatcgaatcttctaaatggtgcggctcaagtcctggaataatcgcaagtggcatataagtatgttcaatcgaataggctttatgaccaacttctctcatccggatgattcggtaaatatagtcatcctgcatctctaatttttctgcgacttctttcgatggtttttcaatggaaaataaaatgactttcgatttaatgttgtcttttccaaatgtatttacaagtccagacattggccctagcgcgaattcaccgccgttagtagaatgagatttcacgaaagtaccagcaccgcggcgtctaataatcatgccttcttgtacaagcatatccagtgcttttttgacagtgagcttgctgcaatcatacgtgcgagccatactatcgccatcaggaagtttctcatttatttcgtatttattttgattgattttatcacggatatctatgtatatttccatgtatttagccattcccgacattttattggctcctttactgatgtaataagcatagtataccatatacttttacaaaaaggtatccctatgaagaaaagtatatatcttttaataaaagtattgttttttaaataaatgtatgctatatttattttgacaaaagggaggccataaaaaatgaaagaattattaacgtttccaaaagatttttggtggggctctgcgtggtctgcggaacaagcagaaggtcgcggcgacactggtaaggcaaaaactgtttgggagcattggtttgaaacagaaccgaatcgcttttacgaaggtgtaggttcagaaattacaacagatcattttaatcggtataaagaagacgtacagtggatgaagaaaacaggacataattcgttccggatttcgatttcatgggcgagaatgtttccaaatgatggtgttggtgaagtgaaccagaaagctattgcgttttatcgtgatttacttactgaaatgaatgaaaacggtatcaaaccatttgcgaatttatatcatttcgatatgcccgttgcacttcaagacgcttggggctgggaatcaagggaagttgttgatgcttatgtccattttgcggatacttgttttaaagaatttggcgatttagtttatcactggtttacatttaacgaaccacttggaccgattcttggcggttatttagaagatttccattatccgaatcaaatcgacttcaaacgcggcgcacaagctggttttaacacgattttggcacatgctttagctattaaagctttcaaaaaattaaatttgtcatccaaaatcggcgttattttaaaccttagcccgacttatccgcgtagccaaaacgaatacgatttagaagctgcagaaatctgtgatgctttttatacgagaagtttcttggatccgatggttaaaggaactttcccagaaaaattagtagaaatcatgcgcgaatacgatcaaatgccggaatatacggaagaagatttgacgattattaaagaaaatacggcgcaaattcttggcctaaattactatgaaccaagacgcgtgaaagcccgtttaacggctattaatgaaaaaagtccgtttttaccagattggttttttgaaccgcacaatatgccaggtaaacgaatgaatatttatcgcggttgggaaatttatgaacgtggaatttatgatttatgtattgatattcgcgataattacggcaatatcgaatcatttatttctgaaaatggtatgggtgtagcgaatgaagaacgtttcttaaatgaagaaggacaaattcaagatgattaccggatccaatttgttaaagatcatttggcgtatgtacatcaagcgattgcagaaggttgcgatattaaggggtatcacctgtggactttcattgattgttggtcgtggattaacgcatataaaaaccgttacggactcgtttcacttgatgttgaaactggcaaacgcacaatgaagaaaagtggcgaattttataaaaaaatgagcgatatgaacggttttgaatatgaaacaagcaaactagttgggacgaaaagggaggaaacaactaatggctgaaacgaaaaagaagtcgattgttaatggttttattaatgtagcacaacgtcttggtggtcagattcatttgcgttcattgcgtgatgcttttgcgagtattatgccgttcatgattttagctggttttgtcacgctgattaactatgttattttagaaccgactggctttatgggcaaaattgttaacccagatacacttaaaacatggcaagagattggtatttcaatcggaaatggtaccttgagtgtcattacgcttttagtcactgtggcgatttcatatcatttatgtttgaatcgtggctataaaaacgtcattgctccaattcttgttgccttatcttcatttatcgtcgtaacaccgattgcgatgacgttccttccagaaggcgcatcaaaatcaatcgaagtaccaaacgttattccagttagttatactggtgcgtcaggcatgttcgtcggtattatcgttggcttaattgcaaccgatttattcattaaattatcgaaaaacaaacgtatgcaaatcaatttaacaggaaatattccaccagcagttattaaatcatttaacgtgttaattccaattatgattacggttattattttctcagttgtgtcatttgcagttaatcaaattttcagcatggactttaacacgcttgttacaacgattatcacgaggccacttagctatgtgacgacaagtcttccagggttcttgctgattacttctatcgctaacttattcttcggtttgggtattcatcaagcagttatttctggtccgttactagatccatttttacttcaaaatatgcaagaaaacatggttgcctacgcgaatcatcaagaaattccgcatattattaacatggctttcaaagacacttttgcggttatgggtggctcaggaaacacgattggcttattaattgccattttcatctttggaaaacgaaaagactataaagatatttccaaactatcagcagcaccatcgctatttaacatcagtgagccaatcatctttggtctaccgattgtgttcaacccgttacttattatcccgttcgtattagcgccgattttctctttaacaactgcgtattttgcgacggcagcaggttggattaatcatgtagtagtacaaaccccgtggacgacaccgccgattatttcaggtttcttagcaactggtggggactggcgcgcgtccgttctacaagtaattatcattgttataacagtctttatctatctaccattcctacgtatggatgaaaaagttgcttttgctacagctcaaaaaacagaagcaaaataaggaaggaagtctaaccaatgaaaaacattttattagtatgtaatgctggtatgtccacaagtttcttagtagaaaaaatgaaagcagcaggcgcggagcaaggtattgaagcaaatatctgggctgtatccgacgctgagctacacgaaaactgggaaaaagcagatgtcattttgcttggaccacaagttggttatttaaaaggaaatacagaaaaagtagtggaaggtaaaattccggtcgaagtaattaatatgttagactacggccgtgtaaacggagcagcagtgcttgagagagcaatcgaattaatcggttaaaaaagtaagggagtgtggcttatagtcgcactccttttttatcagacaagaaagtgttataatgtgtgaaaaggagcggaattattatgaaatatgtaaaatcacaaatgaaagagcttgtaaaagatagcgtagacttgcaagaacgccttcaaaagctaatgaaagaaatggacttagaaaaaactttcgctttaaaagcactttatcattcagaagtagctgatggtggaccgtaccaaacagcgtatcaagatttggattataaatataaagattaacatcaaatggctctgctaaacaattagcagagccatttttagatatattttccttgaatttctgctaaataatcaacaaaactatcgtaaaagtcatcacggttttgaatggttacatgcgttccaagttggagcaaaaagcggtacccagcctcatgatcgggaagtgtcacttttactaaaaaatgctcttcatcgtgctgtgaaattgcaactggatcaaagcgttcaacgatttgttcacgagctattttatctacaattaaagtgacttcatgcatcaagaacgtgggtctatcaccggtcatgctaaatggttttacaacaaaaggccgcgcttcaaaagtttcttccagcgttttcagttcaacaatacgcgacattttaaacgtccgaaaatcgctacgttccaagctgtaaccttgtaaataccaagaacgattcctaaataggaggtgatatggctcagttttacgaacggtttgattgccggttcgatcaatatagctgagttccactagttgatgttttttaatcgctaaatataaactttcgacttttgcatttaactcttttttcatggataaattggagaaatcaagcgaaatcgaacttttgggtggttcgctggaatgttcgagcatgtttttcattttttgcagcgtttttttagtttctgcggaagaaagtaattgttccataccgtctaagctggcgataatagctgttaaatcatctgctgtcagaagctttttatcgactttgtaggtaggcataattccaatgccacctttcgttccggcaatcgtgtaaatcgggatgttcgccatcgagagcgtgtcaatatcgcgaaaaatagtacgtttagagacctcaaacatcgtagccatttcagaagcactgactagctcgcgttggaggagcagcatgataattccgatgagtcgctcgattttcatttttttctccttttttcgaaatgatgacagacagttgtcatcattcgcgtgttatagttacatcatatcaaagttaagtaactttttggagggaaatattatggcatttgaaattgttgaattgaaaaaagaaacatttactggaaacaaagtagaaatccctgaatttgatccacaaaaaggctttggcccaatgagcgaaattaaagaatcagcctacacaaaatttgcaaaaaacgaaaaagactacgttggcattaacgcaagtcttgacggcttacaatattacatcgtggcaagcgcgaacggcgaaaacggcgacacaaccttcgacatcccagcaggcaaatacgcaaaattcgtaacaagcgaaacagaccgcccagctctagacgccttcatcggcgcagcatacggcgaagtgagccaaagcgacacagttggtattgcaggatcgtttaatttggaagatcttagagaagcggattttacgctttatattccggttgttagtaagtaagttgaggagatctctttcggatgaaaggggtctttttttatttgtataattaaaagtaaagtaaaaaaacacactaaaaatagtgttaattagttatatttttgatcataggttcacaaattgctcacaaaattaaggagctgctgatgatataatatagtaaatagtagatataatataaagtttctatattcaacgtatatttttctaatactgaagtcctttttattaattaaagagagaaggagacatgattataatggagaaaatagcttccaatacaaattcgactgttgcagctgtatctggagtgaaatcagtttctgtagataaaggtgaaaaaatttctctagaaaaaagtaacatttcaagcatgatgtttggagaagaagttaataatgaattgttgcctaatttaattgatttagtcgagtgtgtacagacacaaagtgaaaaatttccgaaaattgctaaaatgatggctcttaaagatagccaaatcaaattttaagggatgaaaaaattgaatgagaaaacaaatgaacaaaaacgagcaacatataatgaattaattatccaaaaagaaaatcagatggataagttggtagaaaatcaaaaggaaattgaaaagtctctttaccaattagatgaagattttaaaagaggttttcagcgattaaggtatttgaatgaggataatactgggacgggaaaaaatgagcactatcaagctcaacaatgggatgatcatttggagagtaagcttcgacatcaagttcaatatgcacaagaagagtttaattattgttttcaaaaagagatacttgaaatagataatgagcgagaagaattatttaaaaaaaggagtgagattccttgggattgatttattcaagccgtgattcggagcaggtgataaaagcactctctaaaaatttagccagtggaaaagatgtagttgcacaactaaaagagggaagtaaaaaaattattcaggctgttgatggacgaaccttatctggagcagcttatacagcgggtaaggatttatttgtaaatcttgttttacctacaatcgaaaaagtaacatcagcttgtgatgcaattgaacacgaattaaacaggtaccagtcaaccaactcaatagtctcaggtgaaggttaccttgacgaagacatcttaaagcaacaaattgaagctaaaaaagatatgaatacatcaatagaaaaaactgttaccataatgaatatgataatgaagacaagtttaattagagcattatttgatgctgcacaagattgtaaaagagagctaaaccagatgtcggatgttcttcaacaggatattgaagaactccagaagaagctagagaagttatatgaatttgatggacaaacaaaaaacttatttactagcagtcttgatgaaatgaaattagcaatgcaaggtgttttgattttaaataatacaactgtaaatagcgatgggagttatcaacttcctgctggaatagataaaagctggtttacagaattgaaaagtgaaaaacaacaaactgaaatgatagagaaggaaaggaatgcagtaattaaggagttaaatgagttatttgagaaaaatccagcagtagctattgaaaaaattaaaaataatgatcgtttattcggttacgtaatcggagctttagataaattccctgaaggacttcaaaatgcagctcttggaatctttatcgcacaagagagttggaataaacttccaaaagatgttgctacaaaagttttaaatagtgctaaattcgctacatatatcagtaagacatctatcgccacccaagcgattgtctatagtggattgattaaactaaacgaaaaaggatggaatgtccttgctccaattggttatacaacaaaagttctatctaaaaccagcgagggagcaaaaataatagctggatctaaagtgggatttgatttatttaagaaattaggaccagtttctgattttattaaaactcataaagtgacagttgaaggtattggttatgctggagatgggtttagtataactgcctatgcgtatgatgaatatatagatcctaagagcccggcttatggaaacgcaagtaaggctatatatggaggtcttaatttgtttatattaaaagctggaccacttgaaggtgctcaatatggaggtttaccaggtgcattatttggaacagtgaatactgcagttcaagggatggagattcaaaccccatttaagtggttaggtgataatgggaaaataggttgggatggactaatgggatttggtacagattcagatgcagaaaaatggctggctgagcagtatgaattatatgatcaaagagaaaaaaatcttaatgaaggaaatgttggtaagataaaggaagattggtttggaaaacaaagtggccgtgtaaatgtaactgattttaacaagggcctcccaaggtggtagagatgatgaaaaatgtgagttatgaagaagcacgagatacaatcagttccaaagaaatagaacagattaatacaatgaaagaacatacatctagctatataggtaagataatggtgagtattttattcgccttattactatgtttaccagcaatcaattattatccaatatacccagcagtagcttgtattcttataggtagcctgttaattagatatgttgcgttacaaccaattttcaaagtaacaaactataacttggtattatatttagtatggcaaactgctgcaatcttttttatgattgtttttttacgagtagaggcagatagatatcacttgattccgttagtttatattattttgggctacggaggttctattttattaattcgggctcgagtaaatacatatgtgaaagagatatttgaaacgacagctaaatctggaaaaaaagtgttttcaaacataattactaaaattttaggagcttttctggttcttgctgtaattgctgttttattttatcgtggaaataaatggtggcttatgaatatggataccgcagtaggaaattcaagttttttagaatatgttgtgtggggaatcggtttgttcattttgcttattggctttactttgttgccaacattgctattttcgccatctcaatatgtaaaagcaagattgattgggaaatatgcagaggaatttcgaaaagcttatagatttacggagaaagaatggtacggagaaaaatagccaaatcaagaggcccctttcatatgaaaggggcttttcactaaaccaacctcaccaaaaccccaacatccgcacaataccccaaacacccaccagccatttccttcgacgtaaccaaccaatcaaattccgccagctccccgtacgtaagcaacgccgatttatccacctttgtatgatccaccagcaaaaatttctccctggctttttccatcatatggcgcttaatctcatactccaaaatatccgagttcatcaccccatgcgtagtcgaaagtgcagtcgcggccatgaaagcttttgtaatattgtatttctcaaaaaacccccagttctccacgccaacaaatgatttagtactcgttttaaaagtcgagccaatcacaattaatttcacattatccatttcactcgcaaaattaatcacatctaggctgttcgtaataatagtaatctccttatccgttggcagagccgcagcgagacagctagtcgttgtcccggaatcaataaaaatcaaatcattctcttcaataaaatcagctgctgcttttccgataagctgtttttcagcatgattttctgtatcacgattttcgaacggccgaatttcttcaggattattataaatagaaacgacaccaccatagacttttttgatggtgtttttttggagaagtttggcaatgtcgcgacgaatagtatttttagaaacgttgaattgtttgcataaatcatcgaggctagcgctgcctttttcgtgaattaaattctctatcgcttgaatgcgttgtactttcatttgaaattcatcctttggcaaaaaaattgttttctcccctatttataacacatgctcaaaaggtaatcaactatgattttttatggtgaagttagtgacaaaaattaaattgactctccaattttattggcttaagatggggttataatcgattgatggttaacttatgagtaattttaagtggagggataatttatggcagatgtacggaaattaaagaattatattaatggtgaatgggtcgagagtaaggcggacaaatacgaagatgtcatcaatccagcgacgggcgaagtgctgtgccaagtgccaatatcgacgcgcgcggaattagaccaagccgctgtcattgccgaacaagcttttgaaaaatggagccaagttgctgtgccaagacgtgcacgggttctatttagtttccaacagttactcattcaacataaagaagaactagcaagactgattacactcgaaaatggtaaaaatttatctgaggcacgcggcgaagtgcaacgtggtattgaaaatgttgagttcgcggcgggagcaccaacactcatgatgggtgattcgcttgcttcgattgcaacagatgtggaggcggcaaattatcgctatccggtcggagttgttggcggaattgcaccatttaactttccgatgatggttccttgttggatgttcccaatggctatcgcgctcggtaactcgtttattttaaaaccttctgagcgaacaccgcttttaatggagaaattggttgaattattttccgaagctggtcttccaaaaggtgtgttcaatgtggtatacggcgcgcatgatgtggttaatggtattttagaaaacgaaacaattaaagcggtttcttttgtaggttctaagccggttggggagtatgtctacaaaacaggaagcgcgaacttgaaacgtgtgcaagctttgacaggcgcgaaaaaccatacgattgtacttaatgatgcggatttagaagataccgtgacgaatgttatttcagcggcattcggatcggctggcgaacggtgcatggcgtgtgcggttgttacagttgaagaaggaatcgcggacgattttttagcggcacttcgaacagcggcgcagaatgtgaaaattggaaacgggttagacgatggcgttttccttggtccggtaattcgcgaagaaaatcaaaaacgcacaattgcttatattgaaaaaggcgtggaagaaggggcgaaattaacagtagatggtcgtgaaacagggctttctgaaggatattttgttggaccgacgattttggaagatgttacgacggatatgacaatttggaaagatgagatttttgcaccagttttatctgtgattcgtgtgaaaaatctccaagaagctgttcgggttgcgaatcaatctgaatttgcgaacggtgcttgtattttcactaataatgccaaggcaatccgttactttagagaaaaaattgatgctggaatgcttggtgtgaatttgggtgtacctgctccgatggcgtttttcccgttttctggttggaaatcgtccttttatggaacgcttcatgctaacggtaaagacagcgtggatttttacacgcataagaaagttgtcactgcgagatattcattaaaaggttacgaagaataggagggcgcaaaaatgggcaaactgttacgaaaaccgttaaatgaaagaatagcgcctggcgttacgcttgtgcaggatattaaccaagggaattctccgctaagttatgttgggtttcgcttgattgaactggaaaaaggcgccgtttatcaggaggctcttactgatttggagtgctgcattgtcgcgcttactgggaaaattacagtgagtgagggggacgatatttttgcggagattgggacaagagcgaacgtctttgaaaaaattccgacagatagcgtgtttatttctggtggacgggcgtttcaagtgaaggcggacacagaaaaagctcgtgtagcgctttgctactccccggcgaatcgagacttgccaacgacacttattaaagctagtgataattcgattgagcaacgcggaaaatatcaaaataaacgactggtacataacattttgccagatgtaagtggggttgcgagtagtttgttggttgtggaagtgtatacgaatggcgggaatttttcgagttatccaccgcataaacatgaccgcgataatttgccagcagagtcacttttagaagaaagttattatcatgaaattaatccggagcaaggttttatttttcaacgtgtctatacggatgatcgtgcgcttgatgaaacaatggctgtggagcaccagaatgcggttattgttccagagggctatcatcctgtgggggttccggacggatatgattcttactatttaaacgtaatggctgggccgaaacgggtttggaaatttcacaacgatccggaccatgaatggattttagagcgagactaagaggaggatttggagcatgaatctaaacaaacatagcgaacgaaaatttgatttaatcacagtaggacgcgcttgcattgatttgaacgcagtcgaatacaatcgtccaatggaagaaacgatgactttttctaaatatgtgggtggttccccggcgaatattgcgataggaaccgcaaaactcggcttaaaagtaggttttatcggcaaaatttcagatgatcaacatggtaggtttattgaaaaatatatgcgcgatttgaatataaacacggatggaatggtgaaagatacagctgggcgcaaagttggtttggcgtttacggaaattaagagcccggaagaatgtagtattttaatgtatcgtgaaaatgtagcggatttatatttgacgccggaagagatttcggaagactacataaaagaaacacgggtgctcctcgtttcaggtacagctttagcgcaaagtccatcacgggaagccgttttaaaagcagtccacctagctcagaaaaacgatgtaatagtcgcttttgaactggattatcgcccctatacttggaaaaatacggaagaaacagcggtttattattcacttgtcgcggaacaagcggatgtgataatcggtacgcgtgacgaatttgatatgatggaaaatcaaattggtggtaacaatgaaatgacaatagacaatcttttcaaacataaagcagaaattatcgtgattaagcacggtgtagaagggtcttttgcgtatacaaaagcaggcgaaacattccgagcacaagcctataaaactaaagtcctcaaaacatttggcgcaggagattcctatgcatctgcattcttatatggactgtttagcggcgaaaatatcgaaacagcacttaaattcggaagtgcggcggcttcgattgttgtgagtaaacatagttcttccgatgcgatgccaacagccgatgaaattaaagcgcttattgcgaacgcggattaggagggattttgatgactgaaaaaacaattcgactaactactgcgcaagctttggtgaaatttttaaatcaacagtatattgaggtggacggtgaatctgcgccgtttgtggacgggattttcacattgtttgggcacgggaatgtggttgggattgggcaggctttggaagaaaatccaggtcatttaaaagtctaccaaggaaaaaatgagcagggcatggcgcacgcggcaatcgcctatgcaaaacaaaaaaatcgtaagcgcatctacgcatgttccacgtcagctggaccaggttctgctaacttaattacagcagctggaacagcatttgcaaacaatttaccagtattattcttgccagccgacacattcgcaaccagacagcccgacccagttttgcaacaactagagcatgagtcgagtacagcaatcacaaccaacgatggcttccaagcagtttcaaaatattttgaccgtgtgcagcgaccagagcaactaatgagcgcactgattcgcgcctttgaagtcatgaccaacccagtaagcgccggcccagcaacaatctgtatcgcgcaagacacagaaggagaagcattcgattacccagtaacgtttttccaaaaaagaatccactatcttaatcggcaaattccgacaaaacgcgaactaaccgaggcggcgaaacttatcaaagctagccagaccccggttatcattgttggaggtggcgcccgctattcagatgcccgcaaagaattaatcgccctttccgaacaaaacgacattccgctcgtcgaaacgcatgctgggaaatccaccgtggagtttagcttcaaaaacaacctaggcggcacaggtatcctcggtacgctagcggcaaataaaataatccacgaggccgatttagtcattggaattggcacgcgctataccgatttcacaacgagctccaagacagcctttaacccagcgactaaatttatcaatatcaacgtcagccggatgcagacatacaaactagatgccttccaagtggtcggtgatgccaaagcaaccctaatcgaactcacgccacttttaaaaggatacaaaacccaatttggtgacaagatttcgacgtataaaaaagaatggctaaaagaacgaacacgtctacaacatacaaaattcaatcgtgataatttcgctccagaaatcaaaaatcaatttgatcaaacaactttaaacgaatatgccgatagcttacagacggaattcacacaaaccgaagcattgattacaattaatgataccgtggcgccagatagcatcgtagtttgttcagctggttcacttccgggggacctgcaacgactgtggaatcccgctgtaccaaacacgtatcacctagaatatggctactcttgcatgggctacgaaataaacggtgctcttggtgcaaaaatggccgcaagcgataaccaagaagtatactctatcgtcggtgatggcagtttctgcatgtcccactctgaactgctgacttccttgcaatacggtaaaaaaattaacattatgctcttcgataattccggatttggctgtatcaacaatcttcaaatggcaaacgggagtgacagtttcttctgtgaattccgtgataataacaaccaaatcatgcaagtcgattacgctaaaattgcagaaggatacggcgcaaaagtctataaagccaacacaaaagaagacttagtcaacgcgttagaagacgccaaaaaacaaaccaaaacaactttaatcgacatgaaagtgttgcctaaaaccatgtcagaaggctaccttaactggtggaatgtaggcgtttccgaagtttcaaataaagagagcatcacccgagcatacgaagcgaaacaaataaacctgaaaaaagcccgactatattaagctaaacaaaaacaagcctgactcagaggcttgtttttgtttgccgtatctaatagccgcgccttgcatcacagcagtttttctttataataagagtaactgtaagattatgttttttaggaggaaataatatggaagcttttgcagaatatctagctgagattgaaaacccggaacaccgcgcacgaacacaagaagttttaacctgggtggcggaaacttttccaaatctaaagccagaaatcaaatggaatacaccaatgttcaccaataatggtacgttcatcattggattctcaattgcaaaacagcatatgagtgtttccccagaagtagctggaattgatcgttttgaaacggaactgaaagaagctggttatagtcatacgaagggaattttccggattttatggaagaaaccagtagattttgatttactagcaaaaataatcgagtttaatattcaagataaagctaattatagtagtttttggcgcgtatcagtaaattatagttactttgtcgcgtagcaaatccggattttttatgacataataaataagctaaaatgtattttaaaaagagtggtgtaaaatgcgtattttttgtggaattatgtcaatccaagcaggctttattggtgctcttgctgaactactaagtcctgacagcaaaaaaaataacttgtttatgataccggaagatcttgcggcgtcatcgggctatctaatgtcacttgcgatgattttagcaggaatcctcattatttgtgcttatcgaaatgattttctaatatttatggcactaattttatggctatttggactagtttttggactgattttcaccccgagttattcgggattctatttccgtccaatcgtatgtttaataagcttcttaatgggcctgtttatttttacggattatacaagacatcgagatgtgaacgaagaaaggtgagcgaaatgcccacctttttttattttatatccgtgcaggtcgcgatgtccgaaactgcaacccaagatcaatcaatgcacaaatccaaatgcttacaaaactaacaaataacggtaaatttgtataaagattaaggaaaaacaacccaacgagaagcaataataaaagcgcatctttccaaaaagaaaagctcacttccacctttttgtgggttataaaaacgaattgttttgagatgaaaaatagtgctacagagccaaacaacatcaaaagtaacacatttttttctaaatgatcctcaaacaataaatgcaaattcgccgcaagtagcataatggaaataataataaagaaatgtccataaattaagtactgcccatgggtttctttatgatgatcgattattttttcaaagctatgaaagtaagagacgaagagtgtgctgataattaaaaagccaagaaaagtatagctgatagtatataaatcaagcgtatgccccaccaaaatggtagtaatcgcgacgatgctctcaccaaatgtaataatgacgaacaaaccaaatcgctctgccaaatgcgggaaatcaacgggaactttccgtaatgtttttgctaagaataacggtaaaataatatcaactgcgatacctagatacattactaaataacgaataaagccatcaaagaaaaccgaagtagctgtcgtgaaaaccccaagcagaaacacacttccgagtataatcgccaccttgcgcgcgtttccaactagctgtctactcataacaaaatactgaataaccgtaataaatcgaatgcctaaataaccaattaaaaaagtatagtacgtatttgaaaaagttaaatcaaagctcgccgtcatcaaaatcaagaaaaacatttgcggcaacatataaagttcaggtaattttatcttttcaccaaaacggttgaaaaacatcgtctgccccacccacgcccaaaacatcggcgttaccatcagtaaatattcgccaaaataaacagctgttttatcgggatgattatcaacactaagtaaaagatgggtcgtggaagcaaccgcggtaacaaatattaaatcaaaaaataattctagccaagaaacttttctttcagtcattatttcaccccattaaatgctcttttttaaaattataccacgcggaaagctattcttatttacttttgacagtggcttgccgagaaaagtataatggagggacaaattactaggacgggagagagcaaaatggtgaaaacttgggatgaatttttagagcaagaagccaaacagccttattttatagaattgatgaaagctgtgagtgaagcgagagaagaaggaaatgtttatccatcagaggaagatatgttttcgtgtttccgcttatgcccttatgataaagtcaaagttgtcatccttggtcaagacccttatcatggcccaggtcaggcacatggcttaagtttttctgtgcaaaaagacgttcgaatcccgccaagccttcgaaatatttacaaggaactaaaaagcgacttggatattgatccagctaatcacggttatcttgctaaatgggcggaacagggagttttactaatgaacacaagctggagtgtggaggaagggaaagccggaagccacaaaaaattaggttgggcgacatttaccgaccacgttttagaagaattaaataattacgataagccgctcgtctttattttatgggggaatcacgccataaaagctgcaagtggcatcactaacccaaaacatttactgattaaaggagtacatccatcaccccttgccgcaagtcgtggctttttcggaagtaaaccattttccaaaaccaatgagttcttaaaagagaataatagaacgccaattgattgggatttaaatagtaaataatagcaacattttgtcgttttttcttcctattataaatttttctttaaaagtgaaaaaatttacagaataattgctaaaagttttttacataaagtttctttcgtgttatggttattacaggagatagttaaaacttaaaaaagttcctaaagaaggtgactggtttgaagcataattttacagaagatgactttgtttatggagaatcatggggactcgtgcatcggggggttttagaagacaaagaaatagaaagaatgaaagcgctacgagacaaagtagtgggcaaaaaaggtgtagcacaaacgacacttaaaccgattggcagtgtcagaatagacggagaagtctatgaagctcgcttgaaaacaggttatttggaagttggaaaaccaataattgcagtaggtatcgatttcggatacgtactagttaatgaagatatacaggagggagaaaaatgacaatgattggaccaattattatcgcagtattgattatcatctttttaatcgtcttttttactttagtaccagtggggttatggattagtgcattatccgcacgtgtaccagtaggactaggaacattaatcgggatgagattacgtcgggttgtaccttctcgcgttgtaaaaccgttaattaaagcagtaaaagcaggacttgatttagaagtaaaccaacttgaaagtcactatttagcaggtggggacgtggataacacagttgatgcgttaatcgccgcacaccgcgcaaatattgaattagattttagccgtgcagcagccattgaccttgctggacgtgacgtacttgaagcagtacaaacttctgtaacaccaaaagttatccgtacacctgaatttactggtgtggcgcaaaatggggtagaagtaaaagttattacacaaattaccgtacaatctaatattgaacgtatcgtcggtggtgcgggtgaagatacagttatcgcgcgtgtcggtgaagccgtagtatctacagtcggtgaaacgagagaacatacagacgtacttgaaaatccaaacagcatttcgaaaaaagtccaagaacaaggacttggagacggaactgcttacactattttatccattgatatcgctgaaatgcgtatcggtgacaatattaaagcaaaactagacatcgaaaaagccaacgcggacatggaagttgctcaagcagctgcatcgaaacgtaaagctgaagcgattgccctagaacaagaaaacagagctgccgtagtagccgcagaagcagaagtaccacgtgctctttctcgcgctttagaagaaggcaacttaggcgtaatggattactacaaaatggaaaatgtacaatcagatacagcaatgcgcgaatcgattgcacacgaagacgaaaaataaaccttgatcttttgcaagaaagaaggtgttttcattggatttaagtgattttctaaatagtggctgggaaggtgttttagttatccttggggtgattggcgttattgtaaatctccttagtaaatcgggcaaggcagctgacagcgaaaaaaaagaaccatccaagctaagccaaatgtcgcgtgcgaactacaaaccgcaacatcataaccaaaccactaaaaaaccagcaaaacgaaaagtatcacaaggaacttttacacaaaataaagagcaagataaagttattgcggaacaaaaagccgcacaagagaaaatgttaagagaaatccgccgggaatccgacgtggccaaagggaaaaagataatgaaaacttccacgcatcgccctaaaaaagctcgaaaattacggggtagattacaggaagcaataattaccaaagaaatccttgataaaccagtctctttacgaaaaaaccatctatagaaataagctcaagaactcgtttcttgggcttatttttttgctgtgtccaaactgttacataataaagttaagttttaaaatagctgtattacaactgtaacattcacctgatatgctgtgggtatataaaaaaggggtgcgtggattgaaaataatagcagcgagaagaaagattttttttgcgttaatagctttaatgatttctttttcagtactatttttaccaacaaatagcgcatcagcagcaactacttacaagatgacgacaacagctgatgtaaatgttcgcacagcagacaatacaagcggcaaagtcatcggtttttacaaaaaaggtactacggttacttttacagccaaaacaaaaaataactggtacaaaacaacatataacggtaaagtaggatatgtttcaggtaaatgtttaactacatacaaagcacctgttgcaacaacacaaagttttgccgcattaaataatgaagcgagaaaacaccttggcaagcgctataaaatcggcgcaactggcccaagctgctttgattgctctggatatacgcaatatgtatattcaaaaggaataaaaaaatctattcctcgtacagctaaacagcaatatgcttccgccaaaaaaattaaagcaagcgaactaaaaaacggcgatttaattttctttaattacggcaaagggattgcccatgttgggatttatgtaggaaatggaaaaatgcttaacgcccaaaataacggcgtgaaatacgacactatcaaatctggctactggaaaaaatatattgctggatacggtcgtgtagcaaatttaaaataattttacaaagcgtcactttccggtgatgcttttttgtgtaattaataaggaggaatcataagtggagtttagtataaaagaaatgcctttagaagagttggaaccgaaagtaatcgaaggtctgatgaatcataaagaaagaatgggatactcgatacctaaaagtgaacctgtttttattggatttgcagcgataaatcacgaaggaaaagtagtcggtggcgtaacagctaaaacgagttacggtgaactccatgtgtcactgctttcagtagatcaaaaaatgcaaggaacaggagtagggacagcattaatagaacaaatagaaagatatggtagagaacatcattgccaccatatctctctaacgacattcagttatcaagctccggaattttataaaaaatgtggcttcacagagcttggccgtatcaaagattttccattaaaaggtgaggaaaaatactttttcgtcaaatatctataaagtctacatggaactgtttttgttagcagcggcttgaacggcactaatgacagaggaacggaaacctgtatcttccagtgacttgactgcttcgattgttgttccaccaggagaggtgaccatgtcttttagttttccaggatgttcgccagtttctaataccatttttgcggcaccaagaacggcttgagctgcgaatttataagctttatctcgcggcatacccttcaaaacagctccatcagcaagcgcctcgataaacatatacacatatgctggggacgaaccactgacgcccactacggcatccatcaagttctcagcaacaacttcggcttttccaaaactagaaaaaatagtagaaatatgcgctgtttcttccgcagttacattgctattaggcgaaatggatgacattgcttcgccgacaagcgccggggtatttggcataacgcgaacaattttagtctctgttgacgttaattcttctaagtctttaattgtgacccctgctgctacagaaataacgattttttcaggtgttatcttatcttttactgctgttaaaatctcaggaatagtataaggcttaacggataaaatgataatatctgcttgttctgcaagttgagcgatatccgttgttaattgaattccgttaaattccgttttaagtggttttaatttttccatatctctaccacacacaagaatgtcttcttctttccccaagttagcttttgctaaaccacgaatcattgctgcacccatatttcccgcgcctataaaaccgatttttttcatactaattttcgctcctaacaaaatctttttttctattatctcacgttatacggctttgtccagcctttcagaaatggaaaaaagcaacaaacaaattagatctaaaacaatcttaggatttattctaaggttttttgagtttgggattgtattttttgtgaaaaaaagtctgtttttgaactaaacttgtaaagccattcatgaaatttatagcgcaactaaactttggctcgtatgaataataaaatgtagcgaaaatgtgtcaaaagcgactcgcttgacaactaaaaataaacattattgtgataattgtccccaaataagtgattctgagcaacagtaaaaattagcttaggatactatatattgctcaatgtttttaaggtttgaaagcgctataaatggcgtttttatcagctataattaacattggataacagttccaactacataatactgcgaggtgaaaacattgaatttctttctacaattattaggcaacttttctggcgctttaaatttcccagacgtaacagaaatcctaaacaacttaattaaagttatttttggttgatttcaaaaaaataaaacaagagaggaggtaactaaagttgaatttctttctacaattattaggtaatttctcaggagcgcttaacttcccggaaatcacaggattattaaacaacttaatgacagcaatctttggttgattttcacaaaaataaaacagcagaggaggccactaaaaaatgaatttctttttacaattattaactaacctttcaggagcattcaatttcccagaaatcacaggattactaaacaacttaatcaaaggaatctttggttgattgctcattagaataagttgaaatatagggttaaggctgacttaaccctattttgtaattaaagatgtaaatgaggaggatttttaatccatgaaaaaaataatcgcgttaatcacaacagttgcacttctatcaatggttgtctttaactttattccgagtatggttgcagatgcggctagtacttccgagagcaatttgacttataaagatgtacgaaatggcttttactttgttggatatgaagatgtgcaacttgaaaaaggtaaaagttataaatatacagtagcttatgaagcaaatgttgacatgcaagcgactaatactgttacaggtcaatcagcaaaagcaggactatttataccaaattcgtctggcgtagaacttgatagtaacaatgtgactactacacagaataacgtagtggatgtagcaaatgacggaaataaagtatttacacatatatttgaatttacagtaaaagaagatacaaaagcagatattggtacttatttaggagcaggatctgtcattccaacgactccggatgcaacaattatttggaaaaacgtatccgtaacaaatgaaaccccagcagaacaagcagaagctccagttattaatgcagaagataaaacaatcgaacaaaacgaaacttttgacgcattaaatgaagtaactgcaacagataaaaaagatggcgatcttactaaaagcatcaaagtaactaaaaacacagttgatacgacaaaaagtggcgaatatgacgttgactatagtgtgacaaactcaagcaaactcacaactacaaaaagcgttaaagtaaccgttactccagtagaaacaaaaacaaacacagctccagttattgatgcaaaagatcaaacaatcaaagttggtgacctatttaattcgttaaaaggagttacggcaacggataaagaagacggcgacttaacagcgaaaattaaagtaacaaaagacaccgtgaacaatgcggaaaaaggcgtttaccaagtaacttatacagttacagattccggtaatctatcagcctctcttacaatcaaagtgactgttactcaagatggaaaattaattgttaatccaagcgatccgacaaatccagctgatccatccaatccagaagtaacaaaaactcctgtagaatttgaaagagcttcagttgatccaacaacgactaaagtaaatgtgaacaaaattccaaaaactggtgatagctcgatgatatgggtagtcttagcaggactaggcttaactaccattggcatcagctcttatcgcaaaaaagcaaatagataatttatcattgatgaaaagagtatgctaggtctgaaatcagatactcttttcattaactagatgataaaatggcaatcaagggctatttttaaagagctttacacagagaggggagtcatttatgccaaaaattgctaaaagtgatcgattggagaatgttgcttttgagtacattaagaacaaaattacaacgggggagtatcctaccgggtacagagtagtagaagcgaaattgtctcaagaattaaacatgagcagaacaccaattagaagggcgattattaatctttgccattctggttttttagttcatcagtataatcgtggtgccttcgttcaaaacacagaggtaacaattactgagtttttttcgagaatgaaattggtcgaacttttagtgtatgaaagcacggaaaaattagctttacgggaagattatattgttgtagatgacatcatagaaatagcagaaaaagtaattcaatatgaaaaaaatagagaatatgagttaatgcggggtgcttttgaagattttattagcacgtttatcggtaagttgaacaatgattactttaatagagtaattcaagatttatggaatgaaataaatgacaacgcaaccaaagaagtaagacttattattgtttctgcgagtgatcgaattgcggaagaattagcgcacatgattgaaattttaaaatcatggaattacgaacaattaaaaaaatgttttcaacacataatgaacgcaatgattttaattgctttttaaagagaggtttataactattgaaaaaaataagctggatgattatcatgctgattatcgttgctatatcagtaggctattattttataaaagaaaatgagaaaaaaacaccacaagtaattaattacaaaacagtcgaagcgaataaaacagacttaagcgtctatgtttccgcagaaggtcatatcgtaaaaacagtaaatgaatggccagattataaagattttgcggtacaaattatggtggacgaactagaaatcaatcaaataaaagaaaaacaagcagcgaatgtccacgttgaagccgtagataataagatttacaaaggcaaagtttctgatatagatgaaaaaggcatcataaacggctcagtaacatcatataaagttacgattgatttggaaaatgatgatgatttgaaagaaaatatgtcagtaagtgctgacgtgctcgtggcattagaaaaaatgattctgacaatcccgatagaagcagtccacacagataaacaagacaaaaattatgtttatattgttgatgaaaataagcaaaaaaagaaaatctggattgaaacaggaaaagataatacaaaatctatccaagtagtaaaaggacttacagaaggacaacctgtgattattccttaaatggaggagaatgcgacatgattcaactatttaacatctcaaaatcctaccaaatgggagaaaacacaataaaagcattagacgacatatcgcttcaaatcagtgaaggtgaatttttagccattatcggcccatctggttctggaaaatctaccttaatgaatatccttggaattcttgataaggcgacggttggtgagtactatctcaataaaaagaatttaatgcgcgtatcagaccgaaaaatttctaaaattagaaatcggaaaatcggttttattttccagcaatttaatttaatgccccgactcactgcttttgaaaatgtagaattgccgcttgtatatcgaggtgtaggtaaagctgttcgaaaaagagtcgtattaaaaagtttagaacgagttggattattagataaaaagaaacatctacctgcccagctttcaggaggtcagcagcaacgtatcgcgatagcacgagccatagcaggaagtccggaaataatactagcagatgaaccaacaggcgcgcttgattctaaaacaggagaagaagtaatgtcgttgcttaaagaaattcaccgagaaggaaatactttaattatgattacacacgatcaagaaatcgcccaacaagcagagcggataatagaaattaaagacggcaaactctgtgaatggaacaaattatgaatatttttcaaagcattaaattagctctaaaacaactactatccgccaaatttcgaacatttttaacaatgcttggaattattattggtgttttttctgttatattacttgtttcaattggcgaggcgatttcaaaaaatgtttctagccaattaggagatatggggagtaatctggtatctgttagcttttattcggataatccaaacgagaaattcacctataaagaagcgaatggccttttgaatgaggatgaaattggttcgccggaagtaatgaagaccaaagaagtaagaacgaatgtaaagacagcgagtagccaagtaactggagtaaatgaagattatgcgactataaaaaacttagaacttacatcaggtcgattttgttctaatgtagatgttcgatttgcccaaaaagtgactgtcatcggttcagaaattgctaaaaagtattttaaaaatcaaaatccagtaggaaaacatatccaaattgccggcgctagatatttagtaattggtgttttaaaagaaaaaggcgagagtttattcgggtcagcggacaagaaactttttattccggtcacttccgcagaacgactttttaaaacggattctgtagatttatactatattcaaactaaaaatacagaacaagtgccagacgttgtgaagcggacaaaacagcgactaagccaactttttccaaataataaagaggcgtatacggttgtcaatcagcaacaggcacttgatacatttgacagtattactagcacgcttaccattggtttaggcgcgattgctggaatttctttactcgttggcgggattggaatcatgaatattatgctcgtctcggtttcagaacgaacgcgagaaattggtattagaaaagcaatcggtgcaggtagtggggatattttgaggcaatttttgattgaagcgattgtgcttagtttgttaggcggaggtatcggtattttactcggaattttttccgcacaaatagttacagccgcatctagttttgacatgcatgtttctgctacaacgattcttttagcagttggattttcgatgtttattggaattgtgtttggtgtagtgccagcgcagaaagcttcgaaaaaaatgccgatagatgcgttacgagcagattaactatagggggcgtttttatggagaaagaacaacaagtcgatgatacatgggttttagtagaaattgttagtctggtaaccaatgtagaacgacaacgacttagagaacttagttacgctgacttggaagaattttatgaaagagttgtagtagaacaataaagaaaatcctactttttgcgagaataataaaactatgcgaaaataaaggcaaattagtaggaggggtttagatgtacgaatcgattaggaaacgtgatgatggtacgacgctcgttgaatttgggttagaaataaatgcgcaagtagcagatgtattttccttattaacaaccaacgaagggctagcaaagtggtttaatgagcttgagataggcgagcttggagcaaatggacatcttcttttcatcatgactcctgaagaaaaaataaccatgccaattcgtgcatttgaacctaacaaaaaaatcgcctttcagtgggatcaagatgaagtagcgtttgaactaaatgaaattgcgggaaacaaaacaaagttagtttttacagaacaactgaccgcaatcacagagcacagtccaagagatgtgtctggttggcatgtttgcctgaaaaaattacaagcaagcgcggagaaaaagacgtacgattttaacaaagccacatttgaaaccctatttgccaaataccaaaaagcattgaatactgaaaaataaatcctttataaaagccataaatgaagctggaaacgctttgtttatggcttttttctgtttcaattaatctttttccactttaactggaaattccttatgttcaaaaaagtaatcggtttcattagaatgtaattgtaagcaaggcattgaaaaaatacggggtgacgaaatgatagtatcggaagaacaattatttttaaatcagcatctaagcacaaaagaagaagtgctagcttttattgcagacaaggcagaagaaatcggtatcacaacaaattcagctcaggtagaacgcgacttatgggctcgcgaaaaagaatacgcgactgcagtacaacaattaatcgccattccacatgcgaaaacagaggcaatatcagaagcaaaactgctttttattcgcctagttgaaccgattgattgggagtcaaaagaaggttttaaggcacaagccatttttgcgatattagttccagctagtgaggccagccagcaacatctgaaaattttatctagcgtggctgtgaatttactagaagaagcatttcaagaacaaattttaaccattaaaacggaacacgaactgatggattacttgaaagataatttggaaggagaattgatatgaaagttgtaggagttacgtcatgtattgcagggcttgcgcatacaccaatggcagccaaagcactagaaaaagccggagtaaaattaggacacgatgtcaaaattgaacaacaaggagcgatggggacaattgatgaaattacgccagccgaagtgagcgcagcagatgtagttatcatcgcagcagataaagttatcgacggggaagatcgtttcaaaggaaaaccagtcgttcgtgtgaaaattggtcaatgtgttgcgaacggggaagcggtgttaagtaaagtagttgcagcaattgaagcacgtaaacaaaaggaggctaactaagtcatgaaagggaaattaaacgaagcaaaagaccacttaatgtcgggtatatcctacgcgctaccagtcattatcgcagggtcacttgttgtagctgttgcaaaattgattgggattatcggcggggttacaaatctagatgcctacgcagatgcaagcggattttatcattacgtttacttattccaaaatgtaggttgggcggcaattggcttacttaacttagtacttgcgggatatattgcttattctatcgctggaaaacctgctcttgctgctggttttgtcggcggggtccttgctactagtacaaatgctggtttcttaggtgccgttgttgccggtttcttcgcaggttggttaacaaactgggtgaaaaaacatgttcgtatcactggacctgctgctagttctttaccgctaattattttgccactgattacagttggtgccacggggatactgatgtcactgattctcggcggaccacttggttggttaaaccaaacgttacttgattgggtaactgaaatgtgtaaaaacgatacaaacgtcattattctcgcacttattttaggagctatgattggttttgaccttggtggaccggtaaacaaagctgcttggatggctgggaatgcgctatttatgagtggcatttacctaccttcgatcatgattaatgtcgcaatttgtattccgccacttggctacggaattgctacacttttacgcaaaaagaattattctactacattcaaagaagctggaaatggtgcactaattatgggactgattggcgttacagaaggtgcgattccatttacactacgtagccctggtaaattaattccgctaaatgtaattgcctgtgcgattggtagtgcagtaacaatgggacttggcgcttatgtgaaaatgccgccgattggtggaatgtatggtttcttcaccattggtaacggctgggcttacttagttggtggcttggttggtgcatttatcatcggaatctgcgctaacttattcgtgaatttcaccgaagaagaaacagctgcagcagatgacgctgtagatgatattgatattagttttgatgaaatagagattaaataatagttggaggatttaattaaaatggctaaaacgaaagtacatgtaattccgcattcgcactgggatagagaatggtatttcacttcaagccgttcgacaatctatttagtgaagcatttaaaagaagtgattgaaactttagaagcgaaagacaattaccatttttacttaatggatgcccaaagttctttaatagaagattatttacgctactgccccgaagataaaactagattagaaaaacttattgctgaaaaacggcttattacagggccttggtatacacaaacggaccaattagtcatttcacaagaatcaatcgttagaaacttgctgtatggaacgagaatcgctcgcgaaatgggacatagtatggctgtcggctatgtccccgatgcattcggacaaggtggaaatatgccgcaaatttataaagaatttgggatttcaaagtttctattttggcgcggagttgccgataatcgcttgaaacaaaccgaatttatctggcgcggtgatgatggaacagaaatgctagcagaacaaatcccattcggctactactacggagcgaacattccggaaaatgaagcggaactaaaaacgtatttggatgagcaaattggcgctttagaagaaaaagcatccacgccaaacgtatacttcccgaacggcttagaccaagcgccagtcagaaaaaacttaccagaattagttgcgaaatttaatgaattagatcattcgcgtgaataccaaatcgcttctccagaaacattttttgctgatttagaaaaagatgtaactgatttgccagtcattgctggggaattaacagaaggtaaacatagccgtctgcacaaatcgattttctccactcgggcagatttaaaacaagcaaataatgaaatcgaaaactttttaagcaatgtgctagagccggttctgtcgataagctactcacttggaaatcgctatccacacaatgagctcgcggaaatttggaaattgatgtttgaaaatgctgcgcacgatagcattggcggctgtaacagtgacacgactaaccgtgacgtcaaacatcgctataaattggcttcggatttagcaaccaatttactcgatttaaatatgcgtctaatcagtgaaaaaatcgcacaaaaacaaccattccaatttaccgttttcaacccactgccatacgaaaaaagtggcgtgattaaaatgaccgcgtatatcccagaagacaatttcaccatagaagatacgcgaggaaacacgcttgaatacaccattctagagaaaaaggacttaacggaatatgtcttaaatcaacatatttatctgaacccaagcaaaccagtttatttaccagaaaaagtctttttagcaacgatgctagtagatgtgaacagcattccagcgcttggatatgacacaatctactttaatttagaaaaagaagtagctgaacaacaaccaaaacaatctgctgaaacaaaaatcgaaaatgagttttacaaaattcagttagcagataataattcattaacaatccatgataagaaatccggcagaacctacacagaccaaatgatttttgtggaaaatggtgatgacggagattcctacaattattcgccgccgcgtaaagatctattaatttcatctaaagaagcgataatagatagcgtagaggcaagtgtatcgggcattaaccaaactttaactatttccttcaagttaaatgtaccgtataatctagaagaacgtgcaaatggtgaaaaaacaaaagaaatgacaatcaaaacgttaatttctttacggaaaaacgaagagcttattcgctttgatgtgcaagttatcaaccaagtactgagccatcgtttatgcgtcactttcgcaactgaaatagctagcaaattttccacagctgaccaattattcgccccaatcaaccgtcctgtacgacttccagaaatggacgtatgggaagcggaagaatggcaagaagcacccatttcgattgaagcaatgcaaagcttcgtaagtttacatgatgaatcgcacggtgttgccgtaatgacagaaggcgtgcgcgaatatgaaatcattggtgaaaattatgatacgatttcgctaacattattccgcacatttagtcatatgggaaaaacggatttactgtaccgtcctggccgcgcttccggtgaatcaatcgttgaaacacctgatgctcaattactcggcgaaataaacgccacatttgcgctaaccttatttgaaagttcttttgacgaagcaaacattgcgaaaaaagcaaaagaatacttatcaaatccaccagtttaccaaatgtctgattttcttaatggtcggttgatttacgtataccgcgacgaagaaaaaacattagacagcacgtatagcttgggactcccagtgatagacggggcgattattagcgcggtgaaaaaagccgaggatagtgatgccttcattacccgctttttcaacccttatttacaaaaagaaattgccatcccagaaattttccaaggcaaagaacgccacttggatgaaagcaatgaagctgaaacaaaaacaaccttaacacacgctaaagtgcaaacatatttatttgaaaagtaaagtttaactacctcaaaaaggagctgcttatgatgggatatttcgcttataaacgtttagaaacactatttggcatgctccttgatgcgggtagccacctgtcagctcagaaactcagccaagatttacatatttcagaacgaacaatccgaacggacatagccaaattaaccgaatttctcgaaacaaatggagcaaccattaccctaactagaggcgcgggatataaaatagaaattcttgatcccactgcctttgaagcatttcaggccgacaaaaataaaccgaaaaatacggattattttgacttggataacccggaagaacgcgtgaaatatgagatattcttattactatctagcgctgattatattaaattagaagatttggcagacaccctttttgctagtcgtgcgacgatctctaatgacatgaaacaagtccgaacagttatcgcatcttatgatttaacgctcgtctcaaaaccaggatgcggcgtgaaaattgttggagaagaagaaaaaatgcgctacacactaacggctctgattgcctcgaaaaaagcgccagagtcctacttagaaacattttttgagtggcataaacaaaaagagaagttgcaaaagttaatgtcagccgtgacggattatttttttgcaaccaacattcgttttacagatgaagcacttcaaaatttgctcttacatatgatgattttagtagagcgaattgaactagggcattctttagagcaatttgaattaacagatgttagcgaagaagaaatcacaatcgcaaataatttagctggcattctagcttctctttttgaaattgaaatctcagaaggggacaaaaactatttacttctccaaattgctagtaaacggattttgaatgtggaagataaagaaattagtgaattcgatgattatgcctatattgaagggatgttaaatcggattgaatcgcaatatttttatcgtttgcaagatgatttacagttaaaaaaagatttgatcgcacacattcattccatgctttaccgcgtgaaatatcatatgactgtaaaaaatcctatgaccgagcatattaaacgatattacccacttgcttatgaaattacgctagatgcagtagaatcactaaaaaaagattatccgtacgatattaatcaaaatgaattagcttatttggcgcttcatatcggtgcatcattggaacgaaactatcaaatatcctattatcgccataaatcagcgctcattgtgtgcggttcgggatttggaactgcacgaattgtggaagcgaaagttaaatcagctgtaagtaatttagacattactaaagttgtttccattcaagaatataatcgttttattcatattgaagaagatattattctttccaccgtcagaattccagaaaaaaataaaccagttattaaaattagcaatatcccgacgaacgaagaattaaaaatgcttggagcgattatcgaggagcagacagaccctaatcgaggcttcttatcttccttttttgacgctgcattttttgcgagaagtacgcttactaataagacagcgattttggaagagatggttgagtcactaaaaagtaaaaatattgttggcgacgagtttttgaattctgtaatagaaagggaacggctcggttcaacggtgctcggaactggaatcgccatcccgcatcctctaggcttaatggctaaagagacgaaaatcgtcatcagaattttagataatccgattaaatgggatcaaaaacaatctgttcacgctgtctttttattatgtattagtaaaaatgattacgaagaagcaatcaatatttatgaattacttgtggaattagttcgcgaagagtacggtgaaaaacttgcggctttaaaaagttttacggattttactagtttagcgaacgatattttaaagaaaaagtaaaagctacctccttttcatcaaggaagtagctttttttaatgaagttttagtgaactttttgattttaccatttggtcaaaggcgatttcatggtacactagtaaggagaataattatacagatggaggatttaatgaatagacaaacagaatttattttgcttataataggcgcttcttttagtatcatcactttttttgcagcagcattatatgcactggtttttggatttagcgcaattgttttatcgggttcaccaatgacttatggtggttctgaagaaatgattatgtcttggatatttactttcttttctattattgctgtgatttttacagtagcatcagctgtttttggatttattggagcttttaaaattaaaaataacagctctaaagtaaaaacaattgctgtttgttttatcatattaggaggattgcaagttttttcaatacaaggtattctatttttaatcgcaggaattttaactcttacaaaaaaggaatacaaaacaaattttagagaaaatgaggggataaaatgggaatagcagtcttctttccaatatttttgatttttgctatgtttctaggactcgcagcaaaagtgctattagctatttggatttataaagatgcagaacaacgcggtatgaatgcgattctgtggtgcctattaatgattttcataaatgtaattattattctagttatttatcttatcgttcgtacaaaaggcgaggtaatgagaaaaaacttaggtctacttattagtgggattggtgtagcggtagtaaatacctttatcgtcattattgcctgcattttcttgctgtttttcgcagtaaacgatggtggaatgcataatatgatgaacgattatgacaatgaatatcaatatgatatggacaactggcaagaattttaataacatctgtaagaatctgctaccaaatatggagcagattctttttatatttacataaaaggggtatagactataaaaaagtgaatctcgacaaggggaattgttgaatggatacggttattttaataacggttattatcgttataatggggttagcgtttgattttataaatgggtttcacgatattgcaaatgccgttgctacgagtatttccactagagcgttaaaaccacgtgtggcgattgggattgctgctgtgatgaactttttaggagcgatttcttttacaggagtagccgagtcgcttacaaagagtatagtggatcctttttcattaaataacggagaatttgtggttttatgtggtttaattgctgcggtgatttggaatttgatgacttggcttgttgggatgccgagtagttcctcgcacgctcttattggtgcgatagcaggtgcttctattgcttctgctagtagttttagcgtgcttaattggtctggatttacaacgattattatcgcgttaataatttcgccaatcattggttttacagtcggttatttaatatattcgctgtttaaaaccctttttcatgataaaaaacttggtaaaatgaatcggcgttttcgttttattcaaattggaactgcagccgttcaagcatattctcacggaacgaatgatgcccaaaaaacaatggggattatcacgctagctttagttgcaagtggacttttaaaagaatcagctggaattccgttttgggttcaagttagttgtgcggcttccatggcgatcggttcatctgtcggtggttaccggataatcaaaacagttggaacaaagattatgaaaattacaccagtaacaggagtagcttcggatttaagttcgctttcagtaatcatgtcagctactttaatccatttaccagtgagcacaacgcaagtaatcgatagctcaattatgggtgttggaactgctaatcataaaaaagaagtaaactggcgtacaggtaaaaatatggtggtcacctggttcatcacgttaccattagctggactcttagcggcagtggtatactggatatcagcagccattttcttataattaggaggaatttaaatgaaaatagaacatgtagctttatggacaaaagatttagaaaaaatgaaacaattttatgtgacttattttggtgcaacagctaatgaattatacgaaaataaaacaaaaggcttcaaatcctattttctctcttttaaaagtggggcaaggctggaaattatgagccgcatcgatgttgctggaaaaaacaccggcgaaagtttaggctgggcacatattgcgatcgcaacggactcaaaagaagccgtggatgaactaacagaaaaaataagacaagctggttttagtgtcgctggtgaggcgagaacaactggagacggctactatgaaagtgtagttcttgatccagaaggcaatcgaatagaaatcacttgttagtacctatttgtcactaacttatttatcatgtagtatacagttatacatattattgatgaggtgaatttatggatattgtaactaataaaattgtcgtagagaaatacaactttgaaacaacaatggaagaaaatcaaccgttcgaaaacaaaattgaattagaagtccatgaagtagaaccagttgatggaaacgtagaattaatggctaaaggtaagatttttaaaatcacgattccgtttttactagttcttgaaaatttccggattgacggtcgaattagccgtattatccagttaaaagacttttttggtcaattttctgacttagaagcaaaagatgtggaaggtttatcaaatccactaattgattacattaaacgtcttacttacgatgtgaccgaaattgcatttgatgagccaggggttagtttagattttaatgctaatcataacggctagataggagaagaaatgcgccaatatatgaaaatggtacgcccatttgattttgtaattatcgttgcactgattttgggttcgtttttaccactattgttattttccgttgctgaggctaaaaataccggcgatgaagtcgtagcaatcatttcacaaaatggcaaagtaattcgggaaattccgctaacaggtcataaaggaaatgagcaatttacgattaaaggaaaaggcgcacaatataatttgatggaagtagacggcgagcgaattcgcatcaaagaagataacagccctgaccaagttggtgtgaaaatgggctggaaatctaaagctggtgacaccattgtttgtttaccccataaagtattcgtggaaataaaatcaacacagaaagatagcaaagatcctgatacagatttaattgtgccaaattaaaaaaaacagcaagcgccaaatactgggcttgctgttttttatttaatcaaggagttcgatatatccttctgttccatttattcgaatacgtgcaccatcctgtataattttagtggcattttcgacaccaacaacagcagggagaccatattcccgagcaattactgcaccatgtgtcatcagcccgccaacctcggtgataagccctttaatcgaaacaaacgcgggagtccagcttggatcggtaaaagctgtaactaaaatatcgccatcttctaaatcagctttttccatatttaaaataacgcgtgcccgaccttcaaccacacccgatgaaacaggcagaccgagaatcgtattttccggaaggttttcgcggtgatattgcccgctaatcatttcgccgtccgatgtaagaatccgcggtggcgtcaatttttcataagaagcaaaatcgctttttctagtattaataagttgataatcagctttatttgtacgtacaacttcgcgtaattcatcaaaataaaggaaatatatatcttctttttctgagataacgccacttctcacaagctcttcgccagcacgaagcaatgcgcgcttataaataaagtaacgattaatcattccgtattttggatactcgcgatagccgatgaaattacgtaaagtatcgattttcgtttttgtttcggccgctttttcagccccgtctggaagctctgctaattgttttaaaagggtttgttctttttcgcgcgcttctttttcgccttgttcgaacttgtgtttacttgcatttggttcgaaatttttaatattactcaaaattaatggaacgagcgctagcgggttttctatccagcgcgtttttgttaagtcgatttcgccggcgcagcgcattccgtatttttctaaataggcttctattgcatgttttgcttctttaccaccttctaaatgagctagatcagctaagaaatctggatttttagtttgttctaaatagcttctaacagcaggatatggtcgaatagcatcggctacatctaacaattctaagcccatctttgaagtaatattattgggtgcggattcagaaagtgtatctgctacgtttttttcaccaagccatttgctaatatgctcgtttaaccatgcagaagcgtccataccagccataattgcatcaatgcttgtctggttaaataaaacgcttttaagctccagaaggtcctctacaatgaaatcaaataaggcggaacctgatttcgttttaatcgtctcattaagttggttaatggatgcttcactattttttactaattcaaaaacgacagcgggatcaggaacatttcgtacaggtggtttgcctggtgcggtcgcatgattgggtgtgttttccactggtaatggtggcaagaaatcttttttattaataactgtcaaaagagcatctttaattaatgggtcagacgcgccaagtgtatttaccatcatatctcttgaagtggggaaggataggctttgggtaatatccacgaataatcttccaccagctggatacatcgaagcagaggttgtcattaaataaaaggaaagaccaagtggcttcattgcatcagtcatcatttgttgatgagccacagatatatagacccgatttcctggctcgtccacctcaggaactggataaagcgtagtaatcggacgactttgaacaatataaaattgcccctgagccaaacaccattcaatatcttgtggtttattaaaatgagcttctacggttctgccaagtttagctaaagttaaaatttgttcatcggttaatgtttgagctgtttgcttggatggctccagtggcctcgtttccgttccgccttcttttaacccatatatggcgatttttttagtggcaatgattttatttgtaatagtattttcttggatggtataggaatctgctgacactaaaccggaaactagagcctcacctaagccgaaacttgcatcaatagctagtgattttcgattagacgtgattggatctgcggtgaataggatgccagaagcttcagggaaaatcatttcttgaacaactacagccaaatgcaccttgctatgttcaaaatggttttcgtttcggtaaataatagcacgctcggtaaataaagaagcccagcatttactaatatggcgcagtatttcatctataccaataatatttaaataagtatcatgttgcccagcaaaggaagtatgagggaggtcttcggcggtagcgctagagcggacagcaaatgccgcgctcgcatcgatgttcataatagcagcatcaatttcaacgctgatttctggagcaatcgggatattttgaatgagtgtgcgaatctttgcgctaatttcacgaatgtccgctgtgttttcgttttcttggagtgtgagttgttccaggagttgtttgaattcatgattttctgctacggtttctttgtatgcttcggtcgtaacggaaaaaccggctggtacgcgcacgccttgaatctttgcgcactcgcttaaattcattcctttgccaccaactaaggcttcatttgtttcgttggtttcctgaaatttcaatacgtatgacgtcatttcgttccctcccaaattttcgcaaaaataaattcttgactgtaaagcgggtatgttatataattaaagtagggattgctttacgtaagtctatttaagcgattatatctttataaatttaccatgaatccagctatttttcaattaaaaaccaatataaaaagcaaaatttctcgtattaagaaattttgcttttatttttattgctcgaatttacatagtgataagtttctagatttagcttctgcaatggttacagctgtttcgccgtttgagttgtttaaaccacgacagttttggtcgtaatggtattttttgccagttgcagtgatataaaccatttcgccttgtttattacttgtatctggtttcggagcagagcgttttgcttcagctcgttttgcctcagcagctttcttttcggcggcagctttttcggcagcggcttttgcatcggcagttcttttttcagcggcagctttttcatctgcaattcgtttttcttctgcggcaactcgttcacgttctactcgctctgcctcagctttttcagcagcaacacgctcggcttcagctttatcagcaagctttttcgtgtaaccggggctcatttctaatgatagtgtttgttctttcgtttttccatcaatagtaatagaaagaacagcatcttgggcccggtcaagttcatttacacgaaggctgaattttccgtcctcgtctgcggttgcagttgcatctggattatcaacaaaatctaacgttacttcagcgccagggtttgtttttccttcgacaacaatagctccgtcatccgttgttttaaaggtcttttctgcttttaaaagtggttcaactgtaactttctttgttttttcttcttgcttaggtttctctgtggatgcttcctctttctcgcttggcacaatagcagagccaataaaaatagctaaaatcgaactaataattacaatttgcgtttttctacgtggccattttttctttctaaaacttataagcccataaatcaacacaccaatacctactagaaacagtattgtcccaaatcccgtcataaaaaactccctctccctttttttgtctaacgatttattataggcataatgtgaggttgtgcacaagagggtttaagtaaaaaaaactatttttttgtacgttctgctaaggcattgcataaaattccaataaaaagcatcaaaatcataaaaattgtcacagatttcatccatattatattagaaaaaaaggtgctgttgaaatttaaaaaaaccaaaacaggaccgataaatgctagtaataagctaattggaatcagataaaaggcaagtttgccaagttcttttaagttgtttttaatagcaatcatcctccttttttaagctttcaacaggagtatactacaaaaaatggcaaaaaagaaccctcttgaataatacagatgattgctttatgatgaaggaaagacaagcgttttggaggtgcttaaagatgacgaaaccaatagaagaaatcggcgcagaaattggcgctaaaacagaaaaagttgcacgtaaaactggagaaattgcaggaactgtagctaaagtttctatttatggttcgatttgggctgtaaaaactggggtaaacaagtctcgtgcctttactcgaggatttaaacaaggttggtctggcaaataatatagtcaaaaaagggagaaagtgaattgttaagttacttatcgacgttaaacccggtacttttagcattactagcaggaatcttcacctgggcttgtacagcagcgggagcatcactcgtgtttttctttaaaaatttaaataaaaaatggggcaatgtaatgctcggttttgctgctggtgttatgctcgcagctagtttttggtcacttcttgcacctgcaatcgaaatgagcaaggatttagggaaattttcttttgtgccagctttagtcggttttttactcggtggcatatttttgcgtgtcattgatcgcattattcctcacttgcattttggatttcccgaacaagcaaaagaaggtcctaaaacatcacttcgaaaaagtattttgctagtgctttcgattacgattcataatattccagaaggcgcggctgttggtgtggcttttggggctgtcataactggtgatacggaaacgcttattactgcgattgtattagcacttggaatcggcattcaaaattttccagagggagcagctgtttcgattccattacgcggggaaggtttatcaagagggaagagcttttggtacggacagttatctgcagtagttgagccgatttttgccgttatcggtgctgttttagttgtttttgttacacctatcctgccatttgcgcttgcatttgccgctggagcgatgattttcgtgattgtggaagagctaatacctgaatctcaagtggaaggttcagccgatttagcaacggctgcaactatggctggtttttcagttatgatggttttagacgtagctttaggataaataataacctgccgtagaaacgttatttaatatttgcgaaatacgtttttttacggtagaataaatagtgaaatatttcacaatatgctagttttcaggggtaatcctgtaactataaattggacacggaaaaaagctcccactttatccgtgtcttttttgtaacaaatgttacgattctgttggttctattttcctattttagtacaaaaactagaaacttgttttttttcatgtataattgttttatacgaaaaactggggaaggtttttctaaaggtgaggtgcataatgtgaaaataaggtggattaaagtttcactagttacgattctcattattgccgtggtttttgttggtgtcatagggttccaaaaataccaattttcaaagtcgcgcaacaaagtaataatgcagatggatagactaatgaaagaccaagatggaggtaattttcgccgcttggataagaaagaggacggagtagaaattatttcttatattcctaaaacttccacgaaacaagacaacgaaattatccagaaagaaattgaaaaggctaaatctgcagaaataaagaaattaaacagagataaagataagcaagggattattttttacacttatcaaaagcagaaaatggccgagcaagtagtatcttacaaagctgtccaatctgagtacgtaaaagaaggtaaaactaaatttgtacttaaggacaaaaaagatatttgcaaaaacattgtcactgacgccaaaacaggcgctctgttaacacttggggatgtgttaataaaaaatgacgaaacaaaattaaatttaaagactgcagcagagcaagaacttattaaaacaggggacattcctttaaaagatgttgggaaactcggaggaataaagagcttagtgaaatgggatcaaactgattttgaacttactaactcggaactaattgtaccagttgaagcaccagggatttcaggaccgaaaaaagtaaatctaaaacttgctgacattgctagttctgtgaataaacgttacttaccaagcagcgtaaaagtcccagaaataccaaaagcaaaaacaaacaaacgtattgcacttacttttgatgatggcccaagcgcttcagtaacaccaggcgtactagatacattgaaacgctatgatgtaaaagcgacattctttgtacttggctctagtgttgtgcaaaatccaggtttagtaaaacgtgaattagatgaaggacaccaagttggtagtcactcatgggatcatccacagttaactaaactatcggaacaagaagtttacaaccagattctacaaacacaaaaagttgtttttgatcaaacaggttattttccaacgacaatgcgtcctccttatggcgcagtaaacaaaaaggttgctgatgaaattggacttccgattattcagtggtctgttgatacagaagattggaaaaataaaaacgcaaaagtagttactcaaagagtccttgctggtgcaacggacggagcgattgtgctaatgcatgatattcataaaacaactgctgcgagcttagatgaaacgttgaaacaactgaaaagtcaaggcttcgaatttgtaactattaacgaactttatggagagaaattgcagattggtaagcaatatttcgataaaacagagtcgagaatggtgaagtaaaagaagagtagctaagatgagtaatcattttagctatttttttatatttcatgttaagttttctttacgtaagaggatttttattttatactaagtgtaaatatatctttacatggtggtggttatttgaaagttagtaataaagtgaggcagttgcgagaagaaagagctattggccaaaatgagttagctcttgcattagaagtttcgcgacaaacaatccatgccattgaaaaagggaagtataatcctagtttagagctgagcttgaagatggcgaggtattttcatttaacaattgaagagatttttcaactagaggaggattagtatgaaacgatacattattaatcgaggtattacggtagttgcaacaattatatatatgtttccacttctaggaattattaaaggggaaaaaatatttggggatatcgttacgccaattgttatgattattgcggctttaattgggacactaacttctatgttcttatttgaaaataaatcaaagcgagaatatgagcaagaaaaaatagaaaaagatgaaagatatatcaataatcgcaaaacattttcttattatgtacttattgttttagctttgacgataccaattgtgttgattgtgctgaatttatacgggattgaacaaatctccatttcgagtttgacaatcatttttcttatcttctgttttgcatatatgattgctttggaattcatccggaaaaaagtatgattgtaggcaaaataaaaaacatccaactttttcgttgcatgttgcctagcatttaccaaattttggtgacaatgccataaatactattacgtgtaatccaaccattcacgtgtttgtgattattagaaatttgatattgtttgccgcggattttactgattttatgtgtaaaaaagctaccgcgaactttgcaaaatacaatgtcgtttactttgagttctctcgtgccaatcggttctaaacgaacaggttgcattgatttaatcaaaggcaacatcgaatttccgccttctttataacgctcaatggtttcgccacgtctgagtatttctactgcatcaaggcttctcataattatgctcctttcttgttgttagtgccagaataacaaaatagtaaagcgaagtcaacgaaatttttcgctgactttttttgtggagcgaaaaaaacttataataccaagcgcgaaaacaaatatgaaacggatacttcggaatttctgattacaacatattttaaaagtaaaaaagcaattctgttataatagaataaaatcaactttaaaaggagcttaaacagatgattagagcgatttctgtagatatggacgggacttttttagatggaaatggtgaatataatcgcgctagatttgagaagatttatgcagaattagtgaagcgtgagattaaatttattgttgcgagcggtaatcaatattatcagctaaaatcattttttcctggaaaggatgaggaacttttttatgtggctgaaaatggggcggttatttttcatcaaggggaattacttagtgtgaatcgttttgatgaaagattggttcaaaagattttgcggacgttgattcaagaatatcaggatttgcaagtgatactttgtggggtgaaaagtgcgtatttgttaaaagcggccgatccggattttaaagcatttgcgaaaaagtattattttgagttgcaagaggtggattcgttcgatgtgcttccggatgatacttttatcaaatttgcgcttgatgtggaagtggctaagactgggcaaattgtggaagatttaaaccaaacgtttgctggggaaattcgtgctgtgtcgagcgggcatgggagtattgatattattattccgggcgtgacgaaagggagcgcgattcagcaattattaaatgaatggcaagtggcaccagatgatttactcgcttttggcgatgcgaataatgatatcgaaatgttgcaattaacgtcgcatagttacgcgatgcaagaaagtagcccggaagttcttgcaactgcaaatcatgtggctccttctaataaggaagcgggcgtgttacaagttatagaagattatatggaaaaaagccaaagaccatgaggtggtctttggcttttttggggagtggtaaatgtgccgatgtttcgtaacggttatatactaaatcaatttaccagtgtagattctacaatatcttttctgcgataaacgttcagaataaggccgagtagtgcagcgtaaactagtaacatgcttcccccgtaactgataaacggcagggggactaccatgattggaactattccaagccccataagaatattccaaaaagctggaacggtaaataatacagcccctccgattgttaataatctgccgaataaatcctttgttttaaaagcgtttaatgaaattcgcaatataaatacaagcagtaatagacaaaggaaaattccgaatacccagccaaaagagtagacaaggaatggaaagacaaaatctgtatgtgcttcagggattgtcagattgttatgaagtcccttgccgaaccaaccagcctgcgaaaggacagctttcactgatatgagattatcagagagataactactaaagaatttaagaatcatcgtactaatgaaaataacacctacaagcaaattaccaagcgctactttaatggcaaattggttacgacgataataaaaaatatacatcactaatacacacaaaaagtatataatactaaatacaaattggctgagtataatgtagaaaataactgggagccaaaataggattagtagacctactagttttttccaacctttaaagtcagtaactttggtgaaaataccagcccacgctatcaagaataaatataagcatatagctggaccattaatcataatacccccgaaagaaagccatattcctccgccaataagcctggtaccaacaaaaaaagatatgaaaaataggattaaggcagccgcgtaaaaatacatccataaattttttagttttctataatcaaagaaaagaaatccaatcagagcaagaatcgcaagggcgagccagacgatttgtttttttataaagaaagaattaggtgatactacatcactcatcagtggaagaaaaccaataccggcaagtaggataaataacgcaataaggagccaatccattcttggtttatgaagctgattcatgtttttgccaacagtcgagggatctcccatttcctggatggctttcttattcgcatcctctatagataatcctctcttttgaaaggagtgacttagctcttctaagtgattactaagctcttttttaatcatactgtgagcttgcttggattttactttagctattactttacctaaatattcctcaaatatagcagaactcataaagaagcctcctcaattaaattttttagtaatccgcgttgtttagagcctctatgttcacaagtagctacaaattttttcccttttgcagttagggaataatatttcttatcttctatccattttgatgagaggattttcttattttcaagtagatgtaaaagggtatacagctgaccttcattgtttttgaagctaagttcatttttttgaaatagttgggtggaaatctcatagccatgctttgcttcatcgtgcagtgaatctaaaatgtttttaagcgtttcttctttccagtagtgaagttctaggtgagattgcttcttccggattgtttcttttactgcagtttttctctcctcggaaaaagaaaaaccctcaaaatctttttttatagaatcctttaaattatagaatggatcatccatgattatacctcctttttcatcttggtttttaataattctctggcgtgttttaacctggttttcaatgtattgctatttacaccagtaattttactgatattcgctaaagagagttcttcgtagtaatgtaagaaaacaacttccctgtattttacgggtaaatccataaccgcgctcattaagctgtttgctacatcttttgcgataatttcttcctcaacgtgttttgacttggacgggagataattccaaattttttcgctgaaatttagtttgcgataatgccaactacccaagtaatctttgcaatgattaatagcaattcgatatagccacgtttttatggatgacttgttattaaactgatctagtttttcatagcatttaataaatatctcttgcgttaaatcttccgctgtcgttcgattctttacataagaaaaaactagatgcagtacatcatcgctgtagttatccattaactggctgattatttgttcggtattttctatgctattaatattaattcctatttcttcaagttcagtcatttaagtttcaccttcttctgcaatattagacgaagcaagtatcatttaggtttggaaaaattttatttatatccctaaaatagcgatagtcatcttataaagtattaactatctgttgaaaatacgcaataaaaaaaagactgtaaacaaaatgattgctctacagtctttggctttttctatttcaataaactaaggaatacaacacccaccataattaacagtatgccagaaaggataaaagtccattctaacgggctttttttctgtttaaaaatgaggatgccgccgattgttgcgacgataacgcaagcttgtgatatcgagaagctcgttgcgacaccaagtacagcagttgctaagaacatgcctagattggcgattgaccacgataatccggtcattaagttgaatgtaacattttttcgggaaatagcagtctttttcgctaagttaataccaatggcgcatgtcagcataccgattgcttgtggtaaaatgatagaaaagccagtgacatcaaaaagctggtttgtcactacgtaaagcgttaaaaagaacgaagatagaataacgataccgtagacatgaaatgaaaccgactccgtgatatgattcccgcgtttttgaaacccggtcattaccaccccaatcaagattaaaattactgcaacaactccgatgataacagccgtaaccgtttgccattcctgaaaaacaaggactgcaaaaagcgttgcgccaacgagttgtgtaccatttgaaatcggcattgccttcgcgacactagaagccgcaatccctttaaactgcagtaattgcccaaaactccaaaagatacccgaaacaaaactcactataaaagaaagaactgttatttctggtgataaaatccagaacaaaatgaaagcaaataatagcgcgctaatcgaagtccccagtagttgttcctcgggggtgctttttcgtaagttcgcaattatcggcataaatccccacccaagaacagggagtaacgcaataagataaatagacataaaataagcttcctttctaggttagtggtgctaatttaaatctaccattctccaaaatgaacagcaatatcccaaaattacggtattcaatgcggtaattttcgtagttttctggggatgagtctttgtaatagaataagcgtagggaaaggaaaattaaaaatgaaagcggtaacgaaaatgattgcaaatcgcgaaaaaaatatcattcagtttctaatgaagacaggtcaaacacgtgttggaactatcgcgaatcatcttggactttcagaaaaaactgtctcaaattcactcaaggaaatcgatgtttttctaaaggattttgatatgacagttgtccgtaaaccaaaaatcggtgtgtatattgagggcgataacaaggcttttgccgaagttagccgattcctagataaccaagtcagccaaatcccatcaactaaagaagagcgggttatctacattttcagtaagttgcttaaagcagacgattatatcacaattcatcaactggccgacgaactttatataagccggagcacgattgagaaaaacatggttgaagttacgaaaatgctggaaaaagaaggtattactttgtataagaaacctagtaagggcatgaaactccttattagtgaacgagaaaagcgcgccttaacatcgaaatttattaataatttttggggcaataattggtatttgaagcaagaaggcgaaaaggtcctccaagcttttgacacgattaaagccgatgtcaccggaatttttccagaagagggcttgaaagaaatcattgcgattgttcaagaatttagtgagcgacatgattttgcttttaccgattatgcgtttcaatcgattgtcattcaccttgcgattgctgtagagcgtattcgagcaggagagtatatcgaaaatgttgagagcgacccaatgaaagatgtatttgattcgcagcgaaacaatacggaaatcctcgttagcatgctagaagatcgtttggatattaaaattccagcatttgaagttggctatattcagttgcatttaacagcagcatataaccaacagcatgatgaactgcttgtaagtgttcgaccacaagaagacgatgtggcagaatttgtcagcacgtgtttagtggaagggaattacgataagagcttacttgatgacttgacgacgcatatgaaatccgccattaaccgcttaaaacttggtatgcattttaaaaacccgtaccttagcaaaattaagcaaaactttccccaagcgtttgaagaagcgctatattttaaagctaaatttgaacaaaagtacgatgtgcaagtgaacgaagatgaaacggcatatatcgcactacattttgaagcatacaaagaaagaagtcgttctttccccgaccaaattcgagttgtacttgtatgcagtaccgggcttggttcatcaagattacttgcggcgagaattaaaaaatattttccaatgattatgattgaaaaaatattatccgttcaggcgttaatggaaaccgaagtcgatgtagatttagtcatcagcacgatttatctcgaactggaagatattccaagtattgttgtcagtccaatgatgagtaaagccgatttacaacaggttgaaagccaaatcgaacgaacgagacgtaagaaaaagaaacgcagccaaccatttattgacttgattgaaccgaaaactatttttgcaaagctagatgttgcaacgatggaagacgcaatcgcgcaaattggtgataagcttgtggatcttggtattgctaaatcagggattgttgaaagtgcgctaaaaagagaagcgttatcgttcacttcttttgaagaaatggcgacaccacacgcagatcctgcacttattaatgaatcgcacatcgctattgctacacttaaaaaaccagtgaaatggggcttagtcgaggttgataaaatcttttttatcgctctgacagaacaaaatggtattaatttagatgcgatgtatgaacaattttataaatatattgataataaaaaatggcttgagaagctgacacaactaaaaagtgccgcagaaatttatgagcatttgttaaaggatgggatgtaatggaagtaaaagatattttaacaaaagaattagtcgtctttgatttagaggcgacgaccaaagaagcagcaattgaagaaatggcagaaatgctagatgaacgtgatattttagcggataaagcgacttatgtccgagcagttttggatcgtgaagcacattcaactactggaataggtaataacattgctatcccacacggaaaaagtgaaagtgtcacaaaatcggccattgtttttgcaagaacgaaagaaatgattgaatgggaatcactggatgacgaaccggtaaacatgattttcttactagcgattactgattccgacaaaacagacggacatttgaaaatccttgctgaaattgcgacgaaactaatggacgatgatattgtcgaaagtttaaaaaatacacgagataaagaagaagttattcgaattttaaatggaggcgtagtagagatatgaaacgtaaaattattgcagtaaccgcatgtgcgacaggagtggcgcacacatatatggcagcacaagcacttaaaaaaggcgcgaaaaaaatgggcaaccttattaaagtagaaacacaaggcgcaacaggaattgaaaatgaattaaccgaaaaagatgtaaatattggcgaagtagttattttcgcagtggatacaaaagtgcgtaacaaagaacgttttgacggtaaagtcgtgctggaagttccagtaagcgcaccaattaaagatgcggaaaaagtaatcaacgcagctcttgcgttaattgacgaaaaataaggaggatctaccatgttcagaaaaattgggagtgaactgaaaaaacacgttttaacaggtatttcatatatgattccgctcgttattgcaggcgccgttattatggcgattgcgcgggttggtggttcgtttttcggaattacagatatttgggatgcgaaatacgcagatagtgcgaatagcttaatttcgctactgcatagtttagatggttttggtggcttggcgcttggaatgatgttcccggttattgcagcatttatcgggtattccatttcggacaaattagcactggcacctggtcttgttggtggtttactggcacgtgatattggcgctggttttctcggggcacttgcagctggtttaatcgctggttatacatgtcttttaattaaaaaatatgtgaaattaccaaaagcagcggcttcaattgtaccagtatttttagtaccagtttttggcacacttattaccgttcttattattaattatgtggttggtattccttttgctgacttaaatacagcgcttgaaaattggcttaatggtatgtctggatcaaaccaaattatgatggcggctattattggtgcgatggttggttttgacttaggcggaccagtaaataaagcggctgtaacaacggcgatggctcttttaacaagtggaatttatgcaccaaacacagcagcacaagtagcaatcatcatcccaccacttggtcttggtttagctacattaatcgcaaaacgtaaatacaatgcagaaatgcgtgaggctggaaaatcttctcttatcatgggacttgttgggattagtgaaggggcaattcctttcgcggtagaatctccactgaaagttattccggctacagtgcttggttctgctgtcggcggtgcgctagctgtaggtcttggcgcaattaaccaagcgccaatcagtggtttttatggctggttcacagttgaaaattggccagtttatattttagcgattgcagttggaacgttaatcgttgcgggtatgtcagtcgctttacgtaaatcgagtgctggtgaggaaatggctggttcaagctacgatgacgaaattgacgaagcagaatgggaagcttaaaaaacggaggtaactatggttaaagcacatattgtgaaccatacgcattgggaccgagagtggtatttcacctcggtcgatgcactggttctaagtgaacaactttttacagaagtaattgacgaattgaaaaagcacccagaagcaaactttgtacttgatgggcagttgtcgattttagatgattatgtcgcactgtatccggaaaaattagcggatattaaacagctgattgcggataaacaacttttcattggaccatggtttacacaaacagatgcctttttcgcgcatggtgagtcaattttgcgcaatgcgatgattgggatttttgatagtaaaaaatacggcgactacatgaaaataggttatttgccagatacatttggctttaatgcccaaatgccgactttacttgagcatgctggctttgataatgtgattttctggcgtgggattcatcttggtgaacatgttgcgtctccgtattttaaatggcaaggacttggcgaagaagcgtctatctatgcgattaacatgccacaaggatacggcacagggatgcttctggaaccaacttcggcatacgtggatgggcgccttgatccagcgattgattttatcgaaaaatatagtaaaacgaccgaagtattaattccatctggaaacgatcagctgaatattattagcaattttgccgagaaattagcagaaatcaacaagatgggacgccatgattatcaacttagcacctatcaagattttattcaatatgtaaaagagttaccagatttagaagaatatcgcggcgaattcagaagtccggtgcttgcgcgagtgcataaaaccattggctccagccgaatgaatattaagctaaaaagcgcgtcactcgagcaaaaactgctaacacgtattgagccacttcttgttattgctaaagcatctggaattgccattagcgaacggttactaatgcatacgtggaagaaactcctagaaggtcaagcgcacgatagcttggcgggctgcgtttctgatccagttgccgaagatattttgcaccggatgaaagaagctgacgaactatgcgatagtattgaaaacacgattgtgaaaaaaattgctgatgatttgtcacttgccgcgaacgaaattatcatttttaatacggatttacatgattttgacggatataaagaaatacaagtagtaactgagcataaaaacatccatttcccagcgtttccggacgcaacgattgtccaagaagagttcattccatcgcgcgaaaatgtgctagaagaaacaccagccggaaaccggtttattgaagaacctggctactatgtgcttcaagtgcgcgtcaaagtggagcttccaggccttggttaccgcgtgattgcttttgaggagaatgaccgcgaactggattcgatgattgcttccaatgatgtggcaatcacgaatgatttctacaaaatcacttttgaaaatggcgaaattgttcttgaaaaaccaaacggcgaacgcctgacttctttcattacgctagaggatgacgtgaatgcaggtgatacgtatgattattcaccactagctggggatgttgcagagctgttcactttttccacagcaaatacagagaaatcgagtgaagtcgaacgtttaattttaacaggaaaaagcgatttcccgcttgatcgtttgacgaaagaagggcacggcgacctgcaaatcaaactcattttagaggtgaaaaaaggtagcgaactgctggatgttaaagttgaagtagataaccaaattaaaaatcaccgtctacgcttaaaagtaaacacaggtgtgaaaacagactacaatatcgcctcacttccattcggatatatcgagagaaaaccagttgtaccagcgaattggcaagaaacatatagcgaaatgccaatcgacatcgaaccactggaacaaagcgtgacgctaacaaatgaagcagaaagttgtaccattttcacacagggcgttaaagaataccagcaattggatcaacatttagcgctgacattactcgcaacaaccggacaactcggaaaacctgacttagcttaccgtccaggccgagcatcaggcgacacaacgaaaaaaggtcacgtgctcatcgaaacagaaggtgcgcagttacttggtaaacatgaattcacactagccatctatcttggcgacggagctttcgatgaacataaaaccgctgaacgaacaaaagcgttcaaccaagcaaacgtatcttatcaacgccaaccgttcaatcactttttacatcgcttggataataaaatccagaaaacagaacggaaattaggcgcgaagcaaacattaggtatgttgaatttaccgaaagaatacttagtttcagcgtgtcacccgtcctactacacagcagataaatacatcatccgcttggaaaacccaactaacacaccacaaaagttggtattaccggatgtgtcatttgagtatgtgaatgctatcgaagaagttgtcgcgaatgacaacaacacgattccagcatacggggctgttacgttgcgattagacttataaaaagaaaacttgctcaaagcatttattttgagcaagttttttgtattaatcgtaaaaattccttcgaagcactggagaaagtttgattctttttccatacaatactaataccagcagttagaggcggcgaaaaagggataaactttaagttagtattttccgtattgataataccgtcaatgcaaagaatacttgcgatgttctccttagcgagcaaagaagcgttatacagtaaattatatctcccaataacattcaattgttcaaaatgccctccaagccaactagctagctgattatcaatgaacgactggtttgaaacgacaatcggattagcatcaatatcactaggagttacaaccactttttccgctaaaggatgttttgtattgactaaaatcccccaagtatcttctatagtaagtggtaaatattcatattgtagtttttccgcaggattaattaccaacccaaaatccagtaatccgtgctcaattttttctaaaacatcatccgcattgccgctatgcaattgaaaagtaatgtcgggatgtttctctctcagttcatgtaacacgctgccgataaattcaaatcctcttgtttcagcagcaccaatcattatttttccactaatcgtctcattttgcagcaaattcgaagtagtcaactccactaaagacaaaatttcttttccacgattcgctaaataaagcccatcctccgtcaacgtaatagacctatttccacgaataaataaagttacccctagttcttcctcaagttccttcaattgtttagaaagcgttggctgagaaagatgaagtacttccgccgctctactaatcgttttttcacgtgcaacagttaaaaaataattcaacacacgaagctccattaaaaccaccctttcccataactaaaatgaatagttggatatgctttataagtattattcaattataacttctcccgctataattaaatagtaaaaggttttcgagggggaaagcgcatgatagaacaagatttacagaaaagactagtcgaacaagaaattctccaagggtcggatttgttagatgaaattcacgaagtaaaacaaaacaatgaacaacttatcatcgaactaaacaccaagtaccacacaaaaaaagaagtgactaaatatctcagtgacatcaccggaaaaccagtcgatccgtcagtcgatgtctcacttcctttttacagcgacttcgggaaacacattacttttgggaaaaatatctttatcaatttaaatgtaactttcgtggatttgggtgggattacgattgaagataatgtcttaattggtccgggagcaagacttgtgaccgtcaaccatttagtcagccctaaaaagagacgtggactgcgggtagcaccgatttgtgtgaagaaaaacgcctggattggtgcaaacgcaacgatattgtcaggtgtaacaatcggcgaaaatgccatcgttgctgcggatgctaccgtcacaaaagacgtcccagcaaacgtcatcgtcgccggaagcccagccaaacaaatccgtaaaattatcgaggaataaggagagatagcaaatgacaatcaaaaataaagtaattattataaccggagcatcatccggaattggtgaagcaacagccatacttttagccgaaaaaggggcgaagttagttcttgctgctcgtcgcgtggaaaaactggaaaaaattgtccaaaccattaaagcgagttcaggtgaagcaatttttgccaaaacggatgtaacaaaacgcgaagataataagaaattagttgaattagcgattgaaagatacggaaaagtagatgcaatctttttaaatgcgggaatcatgccaaactcgccattatccgctttaaaagaagacgaatgggagcaaatgattgatattaatattaaaggcgtactgaatggaattgcggctgttctaccttctttcatcgcccaaaaatcaggtcatatcatcgctacttcatctgttgcaggattaaaagcatatcccggcggtgcggtttatggtgcgactaaatgggcagtccgcgatttaatggaagtattacgaatggagtcagcccaagaaggcaccaatatccgcacagcgaccatttatccagcagctatcaatacggaattactagaaacaatcacggataaagaaaccgaacaaggaatgacgaacctctacaaacaatatggcgtcacaccagaccgaatcgccagcatcgtcgcctatgccattgaccaacccgaagacatcaacgtaaacgaattcacagtcggaccaacgacccagccatggtaaatagaaaagccttgaactgattgattattcgttcaaggctttttttggtattgcaggagctggttaaacatggtatcttaaattgaaagcgcttaaaaaggagatgacccaatgaaccgtaaacaattagaacaattagaccaaaagtgcctttatgaagtatatgatgacgagcaagaaacaaatgattttcgtgtgggatatatcagagctatttttgattcgttcattatattggaaaaataccatactagagtgggatttgatggttttgcactcgtagcaaatgaagctatttttaaagttcaacaagatactcaatatctgaagccatatcaaaatttaaaccgcccccaggaacaaatacctgaattaagtgaggacggcgacacactattgaattttcttgaatggacgaaaaagaacaacaaattagtggaaataatgactgtctgggatgagctaattatcgggacaatagaaacgattgaagagaatttagtgatgcttaataccgttgcaccagaagaatttcaatctgacgggaaatgctttatagaatgcgacaatattgttgatatttgtattgatacagcgcgactgaaatttattactacttaacgttaattataattaagaaaattaataattcaaataaaaagtaaaaaaattacaattctgttcaccaaaaaagaaaaatacatgctataataattttgtaatattaagaaaaggaccagttttatttcaattaaaactggtccttttctagaaagagagggcagtgaggtagataacgggagatagaaaaagaaataaaaggtaaggcatcgacatcgaatgaaattacattaaaagagggagagcttgacacatgaaaatacatgcaaaagcaaaaaatgtactagtgagcttgatagcatttatgttattcttttcactattgcctggttatgcaccattagcggaagattcacctgtaggagtggatgcgccagacaagaaagcgggagaacaagcaccaacagaagttaaagaagaacgaacagaaaatgaagtggtttttgataaccacgacgggagctttacaaaacaaatctttgcggatcctatcaatatggaagttgacggggatatgaagcgcatcgatgcgaatgtggagaaagaagcagattctgacatgattgttccaaaacaaaccccattagaattaggcttcttagaaaaaatggaagacggggcatatcagaaactaacaaaagctggcgcagaagttacttttcgcttaaaaggagcacgtacaggcgagaatgaacaagcagtaacagaccaaccagcgacctacaaagaaaatgaagttacttatgaaaacgtatttcctagaacagatctaaggcatttaacttttccacaatcagttaaagaagacttagtactacaggaaccaaatcaagtagatacgtatgtttatcaaattgaaacaaaactagatttagaactagcggagaatggcgatgtgctattcaaaaataaatccgacgaaacaatgtatacgcttccaaaaccagtcatgacagattccaatgtcggcactgaaaccggggaagcggcacaatccgaaaatgtttcctttaaagtgaaacaactgaccaaaacagtgtatgaactacaactaaaagtagatacagaatggctaaatgatgacgctcgcgagtaccctgtctatattgatccatctgttcgtttagataaaatttataatgccaatattaattcggctaaaccaaccgaaacaaatattggtagtaagctatgggattctggtcaaaatgcttatacgttaaaactcggtaaatgggacaattcaacaggaaataatgccgcttttttaaaaatggatacatctactttaaataaagcgactatttctaaagcaacattgaaagtctataacatttggcatatgtccccaacggttaaaaatgatctttggtattacgaggcaaatgcaaaatggtctccgtggcaagtgacttggaatacagtgccacctgtaacgagattagggagtgttaacgttggtcgtggtgagtgggcgaacttagacgtaaccaaaactgtccaagcatgggcaagtggctcacgagtgaacaacggttttcgcttaggtactaacattaacaaaaactattggaaaaaagttgtagcaagtgaaaacaataaaaattatccctatttggaagtgaattatacgtacgcacaaccagaaaaaccaaccgtgaaaacaagttcaaacggtgttggaactggaacaggatacatggatttatcttggaaagcggttcctggtgcgactagttataatattgttatttctaatggatataaatacgaatattttaatacaaaaagtacagcaaccacttggagtaccaaaggaaagaaaattttcccaacaaatgacgaaattgctaaaggagaatttgaattccatcatgatggcaaaggaaccgacttcgctcttgatccgcgagcgcaatatgaaaatgcctttcaagccggaagtacttttggacttcgtaatttaacacgctatttattcagagtacaagccgttttcccgggtggagaaagtccgaattccgacttagtattcgcctacatgccaatcgagaaaccacaagctcctgttgcaaaagcgtattctaacttggcacataaagaaacaggatacgtggaacttaactgggaaaagagcccaatggcagatgggtataaagtacttgtctttaatgggaaagcctacgaagaatacgatgtcggcgcagaaacaaagtggacgacacaaaacaaaggtatttggccaaccaaagaagaaattgctgaagggaaatacgctctacaccatgacggaaaaggcgcagaactcgcaaaagacccttccccagtgtataccaattctggcggaaattataaagagcgcacaaactactggttccgcgttatcgcttatcaaaaagcaggaaataacacaactagcgtgcaatcagaaccagccacaccatctattccagaggcactcaataaacaactaggaatggttgattactggacaagtgtgccagttcgtggcggcgaagtgaatgctacaaacggaaactttttattccatgaaacagatttcaacttagaagggcgcggtccaagcattaatgttaaccgtacatttaatagccaagatgatgcaactggcattttcggtaaaggctggacaagtacgctcgaagaaaaactcgtagaagaagaaaacggtaatatcgtttgggtggaatcggacaagaaaatccatcgtttcacaaaaaaaggcgataaatacgaagctccaccaggcatttactccgagattactaaaaacgcagatggctatttgaaaatagaagaagataagtcagaaacacgctttttagttgatggacgattaaaatccgaaaaagacacaaaaggtaacgaattaacatacgaatatactgacggcaaactcacaagcttgcgcgacgcttccggacgtaccgttactctcacgtatgaaggcgagctcgtaaaagaacttgtcggaccagaagaccgtaaaatcagctacacgtataatgacaaacaggagctaatcagttcatccacagcccgcggaaaattatatcgctacggctacacagatggcttattaacctcgatttacgatccaaaacatacagaagaaaaaccatacgaaacaacttttgcctatgaagaagaaaaattaacagaaataaccgatccagtcggcaaaaaaacaacactttcttatgacaaagcagaacaacaaactactttaacaaacgagaaaaagaagaaaaccatttattcctacaatgatgctggaaatccaaagaaagaaattgtagatgcagatggtctcaaactcacaacgacctacacgtatgaatcaaataacttagtaaaagaagtgaatcctaagggacaagaagaaacgtacgcttacgatgcagatggtaatattacgaaagcgacagatgcatacggaacagaatcatacacttacaatgataataacgatgtaacgagctcaaccgatacagaaggacgaaaaacaaccgttacttatgacggagcagatgcggtatcagaaacacttgcgacagaatcccaagtatcctctgtaacacagtatgatgcctatggaaacccaattcgcggtagtggcgaactttcttccggcggtaacttacttcaaaacagcggctttgaaaaaggagcaggagtttccaactggacactgattcaatctgatgcaaaaggaagcatgacattcgataacacacagtcagctccaggagcacttggcggcagcggttccgttaaactaacgagtgaagcaaattctaccgtaaaaggctattcatccgttacccaacgcgtcgatgtagaaccagaaaccacgtatacatttagcgcctggattaaaacatccggaatgacaaacgccgatgcacttctcattggccgtttacaagatgcgaatgcaaaagacgttaccgatgccggcgtatggcaatccaaccgcgccacatcgatcaaaaagaacggcgactgggtaaaacgccaactaacctttaaaacatctaaaaacacgcgccaagtcttgctttatttggacaacgaacaaccagctccacataaaggaaaaggaacgatttggtacgataatgttcaatttgaaaaaggcagtgttgcttccagttacaacccagtagtcaataacagctttgaaaatcataatggaacacttccgactggctggatgcgtacaggcaataccgcgctgacacaagcaaaagtagtcgataatcaaagccacagcggtgatagcgccgtttacttcgagcgaaaagcaacaagtgaagcttacacgcatattgtccaagatgtacccgtaaatcaaaaagaagccaaagcattaacaatttccgcactatccaaatcagaagacgccaaagcaaacggttctgttgcaacgatgtcgaacgattattcggtatggggcacagtatattatcaagatggcacaacttcttctgtacaaggtcaattcccactcggaacgaacgactggaaccgaagtgctgtagttgttaaaccgaccaagccagtcaaaatgattaaagtttacaccatgttccgcaatggtttaaccggaaaagcttggtttgacgatgtacgtgtcatagaaggcgaagtattaacaaaaaatgaatatgacgcttccggaaactatgtaacagctagctatgacgaagaaggccgcaaaatcagcttcacttacgatatttacggcaataaaacatccgaaacagacgaaaaaggcaacaaaaaaactttaacttatgatgcagacaacgcacttatagacaccaaactagcgaacggcacatccgtagcctataagtacgacgacaatggcaacaccaccgaaaaaaatgtcactgcatctggcaaaacgcaaaaaaacatctatgaatatgacgtagataacaaaattaccgcatttaccgacgcactcaatcgcacaatcaagtacgaatacgatgcagccggtaatgaaacaaaagcaatcatgccaaatggtcgcgtaaccgaaagcacatacgattccgctgaccgcatggacgggattaaatggaatgataaactagcatttaaattccaatacgatccaaacggcaaccaaacaaaagtaaccgacgaaattaacagcatcgtaaccgacaaaacctacgacgatgccaaccgaatcaccaaagtagccgaacgaggtggcgacgtaagctacacatacaaagacaaaccaacaaaagacaacaaagggaaaacagacaaagtcggcgaagtagccattaaccacggcgactacacagcaaaaacaagctacacatacaacgacttagaccgaaatacccgcgtaaacgatggaagcaaaaatgcctattttgagtttgacgaatttggaaacatcaacgtctacacagcaggaaacggcaccgcagccaactacacctacgatagcacgcaaaaagtcaccaacgcagctattagtagcgcaagcggtacccaaattttagacgaaaactacacctatgacgcagcaagcaaccgcacaagcattgacaacaaacaagacggaaaaacaacctacgaatacgatgcagtcaaccaactaactaaagaaacactaccagacggcaccgtaaaagcatacacatacgatggcttcggaaaccgcacacaagtagcaatcagcggaagcgagacaaaaacaattgacgcaagttataatgatggtaatcaactagtttcgtggaacggagaagcgctgacgtatgacgccaatggtaaccgtacaagcgatggcaagtacacgtatacatgggataccggggaccgtttaagcagcatcacgaaaaaaggtgagagcgagccgtttacgagttatacgtacgatgatgataaccgccgcttgtcgaaaaccgtcgatggcgtgacgacgaattatcattatgacggagatagtattgatgttctgtatgagactgatggtgatggaaaagtagttcgtcagtatgtttattcggatgataatgttcgtttagcgatgaagatgaacggcaaaaccctctattatcactataatgcgcatggcgacgtgattgcactcacggatgaagcaggtaagattgtcgcagaatatgcgtatgatgcttggggaaatgtgctgaaaaacactgcctctacagaagaagccaaagcgaatccttatggttatgcaggatacacgtatgacaaggaaatcgaacaatattacttgatggcgcgttattacgaaccagagcaaggcgtgtttaccgcttacgatccgtacccgggcgatgaagatgatccgcaaacgatgaatgggtataattatgcgaataataatcctgtgatgatgtttgatcctgatggtaatgttgcatggtggattgcggcagcaggttatggggcattcgaaggtggggcagaatatttattaacaactaagaagaagaattggaagggttttggtaaagctgttgtaaaaggagctgttttaggtcttggatttggtaaattatacaaaggttttaagtttttaaaatcaacaaaaattgtaagaaaaaattcaaaaaaattcaaaaaaacaaagatatataaaaaatttagtaagaaaaaaaaggttgttaataagccctcaactaaacgaaaaaaggctaagaaaaaaaagaagagccgaaaaaaagggcattaaagattgaaaaagagaggagtttattttattgttattaacaatttatatagccctagtgattatttgtctattaatttgtcttagtttagagtcgaaaaaacaaaaatggagtaaaatattgttctggttagtatttgctgtaggggttttttttacaattcggataggggatttatttctataagaaatgaaaatttagaaattatcttagtaaacaacgaatcacgcttatttggaatgtaataaattaaaaagtagagagcttctctattttggtgacaaagtagaacaaaatttgatgaacaaactaaaaataaactgagaataagcctttcgcttatgtaaggagaacttattccgaaaatgaaagttaagtggatagttatattgttagatgttcagaaacaaaaatccttgataaggaaaaaataatgctagacaaaactaataatgtaccacaaataaaaatatttaataatatttcgaactaagctcggttgctaaaaaattacacccagattaggaatgtaagtaattgaataatatttttagtttaatcgtttagccaaaaaatataactattctttttaaactcctaaggaggaaccaaaaatgtccacaaaattcatgtatgaaagattactaaaatgccaagaagcaaataaactagtagccatctatgcgtcacgcgaagacgaatatttcgaggcgggctacattgaagcagttacagcgagtgatgttatgtttcgctcgagacgttcggacggttacgaagagggacatgttgttcttccgttagaattagtgtaccgaatagaaattgacacggcacatttaaaaacagccgaactactcgcaaaacatcttaatcaacaaatcagctcaggattatttgagaaagcaccaaacaaaaagcattctcttttcgaaattgccgctgattatgtataccaaagtaaagagataatctttattgacatcataggcgacgagacgccagtaattggaatgatcgctgaaaatgaatatgaaggattagaaattactttagtggatgacgaaggtcgattagatggaacttgttggataaagaaagaagatattctagccctgcgtttcggcggcagtgtagaacaagatttgatgaacaaactaaaaaaataaactaagaataagccctccacttttacagggagggcttattataaaagtaagagatgtaaataatacaaatcagaaaaataaactttacgggagcatatgattaaataataaaagaaatacttaacttgaattcgaataatttaaaaataaaatgtatccgctataaaacttacatttattacgttggtggtattgaggttctatatgaagcggataggaaagtagttcgtcagtatgtttattcggatgataatgaagacgaatgggaaaacactatatttataatacacatagtgatgttagtactttgatgaatgatgctggtaagattatcgcatagtatgtgcataattctaagcttatgtagtgattttgggttggaaagaggttggccttatgagcaaattaactagtgatgaagtcgaatttaaaataaaaaaacttatcgatttagaaaaaaatttaccgaaacaaatattttctaatccctcaaaatacaatttttattttgaagaaccagaggctatttatatggatacgaatgaatttgtccatatgattaaacaaattgtggaaattacacaggatgagaaagcatatattagtgaaattttgaaagaagataaatttttacaaaagagcaaaactatctttaatttaaaggaagtaatagactttacacaggaagagggtagtatagtagaaaatttggattttgaaaatataaccgagacaacgatatttttatattgctatatgtattttccttctgagcaactctttcttttcgttaatgaatattcagacacagcccttttagcgattgataaaaaacttgatattgatattccttggtatgatgtagaaacatttttgactgtggagaatctggggatgaaagataggctatacaggaagttcaggaagcgtttagttaataattataaaaaacatgaataaataagtctttaaaaaattaataattatttttagtaaatccaatcctttaaaaggattggatttatttggctatcaacagattttttacgactctttgtaaagttagctctaacaaggtatatcgatttttatgattctcattgttcactttttgttcacattgtagctttttttacgaattttggatgaaaccgcatatatttaatgactaattggttatttataatgaatagtagtcgacttacaatatttagaacggaggagaaatgaattgatcagaaaaatctttatcgggattttgtcatttactatcttaatccaaactgtgattgtttcaaactttaatgttgtttatgcaactactgaagagcaacaacaaaaagttattaagttagaaaaaaaatcaactaataataatataattttaataaaagatgctgttaaagataaagaatataaattatctttaccaaaatcttttagtttagatgagaaaaagacaggcaaagaagttgaatataacaaagaaaaaaatgaactaacaattataggaacaggggaagaaataacgctatatttacttgcttctcaaacaggaaaatacgaacttgaactaaaagaaggggacaaagtacaagccaagttagatttaattgtaaaaaatgtagatgaagaagtcgcaaaaacagtcgaaaaatcaaatagacagttactgcgttcatccatttcggataaactatttcttcaagctgattcaagtaaagccacattagctaattatacagaacaaataacttttaactattctattaattttctagatggttctacgacattgaaaaacggtaaattagtaatagattttaataactctaatcttgaactagtgaattatcctaaagatacagcagcaaataggaatataaaatcaacatcttatagtgcgattacaggtaaattaaccattaacttagtggataatatatctagtggtgctccatttgatattccaatcgttgtaagagctggttatggtgcaaagccaggagtaccaatgaatctaaaagctacactgtcaggagagaacagtgctggtgccacatatacaccagcagaaaaaacaaccaccgttaatttagaagaaaatagcagcaatctagactatagcccaattacagcaggtgataatagctgggcttttagtatgaaagaactcgcattttcacttaagccaggtggatataccatccaatggcctgaaatccagaagaaaagttcggaaaataaaagtttcaaaaatttaaaattagaatttcttaaagaaaatggtggggatattatatctgttaatacggcagatccttacgtaattagattcggagagccttattggtcacagcttagcacagttaatggtaaagcaaatgtacttgttaatgatgatgagaaacaagtagtcgaatatggacccattaacgctaatatttaccaaagaatacaggtatcaatggcagcgaaaataccagcagatgcggttaaaggaacagagtatactggtacggtaaatgtatatgatgaagatattttggtaacttccattaaaattaagaccgaagtgactgactcagcgacttcaatagctgttgatagcaaagtttctaaaacaagcatatcagaaggcgatgtactggaatggggattcatgcctagaatatcttctgcggcaccaggtgttaatgatttagaaattgtagcaccaattcctaaaggtattaaagtactatcttacatcccgaacaataactcaatggcaagtatgaaaaaattagagtactatcagaatggtaaatgggtatcaatggctccacaaacttctagtggttgggatttttcaaagattgaccagtctgttaatcgtattgaaaagctaaaacttacttctagagacggaattattaatgataaagatatgccgccgtatactcatggaacaatacgaatgcaaaatactggtgtgaaagcaggagaatcctttacactccaaccagaatctatcacttatacagactctgataaaaccagtaaagcaattgatacaactgcaagtagctatgaaaagaaagttcaagtagtagaaaaaacttctactccagcgaaaataaatggcgatgttttcttatcttcaactgctggtatttatggcaaaggatttgaaagtacaattttttttaatggcgacaaaattgcacagtcagttcgtttaggctcatacggaagtaaactagaaaatccatatatttttgtggtagtaccaaagggtatcgatgtagaaactatgaaaaatttcattcaacaaccgtatagaagtatattaaattatacgtatgctcctgctaatggaacgaatactctttaccctaaatccagtgcagatgttaagggaaaagaaactttatcagatggttccacattatattactgggaagcgccggatactggtttagcaccaggcatggaaaattgcgaaatgctagccttagatttagtttttaaattaaataaagcaaacagtggcgcaaataaagtagaatttggtatgggatcaatgacagattctagttggaatttatatggtgctgctaattcaggatatgaaacaaaagaattatctgccgaattacaatccaaacttcccggagtaacatctactaaatacttgtctaaatcgaagacggcaaatgtaggtgcatctaatagtattgcaactaaaatgaaaattaaaggaagtcaagataacgactttgttgatgttagtgcaaatacagctactacaattccaggtaaaagagtagattataatttaacatttgaaaataatggtacaagaagtatgaagaacttagaaattatcgatatacttccgcacaaggatgatcagtatgttttaggcactggtccacgcggatcgaaattttcagttatcccaactagtgaaatcgaagttcttgttaatgggaagaaaagtgattcagcaactttagaatattcaacaagtaatacacctgaacgtttcgatgcaaacggggaggatgtagcaggtgacccttggcaaatcgtggcaccaacaagtatggcagatgtaaaaagtttccgtattaagctaccaaatacagaattcaaagtaggagacgaaatcagcctaaactttgaagcaatagtgccaacagatgctccaagaaatggtgaaatagcatataactcgattgcttaccggattgataaggaaacaagctctggtacaagcaaattagcatcagaacctcctcgtgggggagtaaaaagtacaaatccatcaacagatttaaacatagccggtaactctttctccgatcttaacaaaaatggtgtaaaagatgcggacgaactaggtttaaacgctgttaaattagatttatacaaaaaaaataacaatgaatttgagaaagtggaaaccgtttatacttcctcggatgctctagataaagaaaaaggtttatttgattttaatggcttgagtaatggaacatataaaatagctgctcatctaccgaataaaaatgcagactttattactaccggtccaaataaaatcgtaaaagactcaaaagatgattcgattggctggataacagtcaataactctacagaattcacaattgatgatttggctaacggaaatcctaaaagtctagttggtattcatgtacctatttatatggcaacacctataaaaggcactgttgttttcgtaaataaagacggagaaccaaaaatcacatcttacggtcaagattatgaaatagctttatttgataaagatggaaaagaagtacaatcagcaattaaaacgaataataagggagaattttcttttagtgatgtagctattaaaaacccagctgattttaaattaaaagtaactgcaccaactagaacaaattttgtctactcagcaaaaaatcctttatttaatatgtctacaaaggaatatactttaaatagtgtagttccaggcgtgggtggggtagcagaaatttatattactgaaactagtaaaccaactacaaagattatactagataaagcagttactccaaatgcaattacaattgaatcaagtgatgaagctacagaagtaacaaatgaatggacagtagtagatagtaatggaacagtcgtttattctggaaccggaaatacgattcgtattccaaacgatgaaggaacgtatatagctaaaaacacagcaacagatgaggctggaaataccgcttctgatgaaaaaacgtttgatatagattatacagttccgacattaacagttaatcaagatgcatcagcagaagtgaatagtactgaggcaaatattgattggattaagccgttaaatgtagcagcaacagatacgcatgatggaaatatcacgccagtagtagattatagtaaagttaaatgggatgtacttggaacatacccagttactgttacagcaacagatgcaagtggcaacaaagctactcaaacagtaaatttacgcatagtagatactacttcgcctacaattttaataacgaataatccattaacgtattctatcgaaaacatgcgaaaattaactgaacaagaattgtataaagcggcaggacttatcggtggagataattatgatttagcaccaggtcaatcagtccaaccaaataaacagccaatggtatttactagcaactttagtactatttttagtgacatcgctagtgtgaaacctggacaatatcaagttcaagtgaatttagcagattctagtggaaatcaagctattccacaaacaattactattaatgtagtagataccatgggaccagtgattaaagcagataatgtgtcttaccacgttaatacaacaaaaacagaagcagaattcttccaagatgctcgtttagatgtgacagataacaatgatgatacaactaatttaattattacttctaattttgcagaaaaagtgaatttgaataagcctggtaagtatgaagtaaccatcagtgctacagatactaaaggcaatcaaacaacaaaagaaataacagttcaagtaagcaaggataaaccagtcattactgcaggtccaaaaataagctaccaaggaaaaaccgaagtaacagaagctacctttttaagcgatatccacggggaagtaacggatgaattagatggtgatgttaaaattactagtgattttgctaaaaaagtagattttaataaagtaggaacatatacggttactttaaatgcgaaagatgaatatggtaatactgcagaacctgtaaaagtgtcagtacgcatctttaataagatcgcaccaactttcaataatgctgataataaaacaattgaagcagtaaacgagttaccatcattagaatctatatttaacattgaagcaaaagactatctttcaggtaataaattaaaagtaacttatacaccagatcaaacaattaaaggcaatgttttaggtgagtattctattaaagtcacaacgaaagatgattcaggcaacacagctgaaacaactgttactttaacaattaaagatacaacaggaccaagcataaaaatgactaaatcaacaaacaaattagaagtacaaagcaaagaaccgaattggataactttctttggagtaaaagcgactgatattgttgatggtgatgtaacaaaaaatattaaagtagacagtagtgaagtcaatcttaataaagtaggaacttatcctatctactttacagttacagatgcacttggaaatgaagctagtaaatcaaaaagcacagtgcagattgtagatacaagtagtcctgcgctaacaatcgacaaactagaaattagttatccaacaggaaaaacagtttctgataagcaatttctacaagatattggtactaaagttacaaatagttatggaacagtaaaagtaactactaatctaagtaaaattgttgattgggacaaagctggacagtataaagtaactgtaacagcgacaaattcatctggaggcgttgctgagaaaacgattctattaacggtcaaaaaagctgattcagcgtttatagcaataccaagtaagaatgataataataacaaaccaacaaaaaatatcccaaaaacaggagatactttaaatacagagctaattgtctttggtgttatgtcgctacttgttggaggatggttgttcttaagaagaaaaacaaaagtaaaaacaaagtgattcataatatttgaagaatgttgtaagactcaaaagttagacctaaaaccgcccagaggaatctggtcggttttttattcggcttgcattctatataaccaataaaaatacgccccaagagttagattttttggtctaactttaggaggcgcactaaattgagtccgttcttttttacaaatatttagtaataaactcactattctgcggtcgatctttcatttccagtacagatatatcatggacgatactatccagcttaatttgatccatttcaagttctattttttgttggagaagttcatatttacttgaaagtacttgttggatattggctccgacgatgcaatctgggttggtttttggatcgacatggattaaatttgtgttgccttcaatacttttataaacatctagcagcgatatttcctcgggtggcttggtgagaatcggattcgctttaccagtttgtgttgtaataaggtttgctttttttaaattgctcataattcttctaatattggcaggatttgttttaacactactagcgataatttcactcgataataaattcgtgtttttgaaaatctctatataagccaaaatgtggatagcatcactaaattggatggagtatttcattttattcaatcctttcaatttttcttcttgacttatcttatcataatgtttattataaaggtgtaaattataaatgtacagcttaaataattaaaattttgaaggagtggtttaaatgacttatttagtaactggtgcaacaggtggactgggtggttatgccttaaattatttgaaagaattggttccaatgacagatatttatgctttagttcgtagtgaagaaaaaggtgcggatttgaaagcagcgggatttaatatccgaattggtgattatagcgatgcagagtcaatgaaacaagcatttgcaggaatcgatcgtgtcttgtttgtctcaggtgctccaggaaatcgtcaagtagagcacgaaaatgtggtgaacactgcaaaagaagcaggcgtttcttatattgcttacacaagtttcgcagacgcagataattccacaagtgctctagcggcagaccatatttttacagaaaaagtaattgaaaaatccggaattgaacatacattcttgcgcaataactggtacttcgaaaatgaaatgccaatgattggtggcgctttgaatggtggaaaatttgtttatgcagctggaaatggaaaaactggctgggcattgaaacgagaatacgcagaagttgctgctaaagcggtggcaggagctcgttttcctgaaatcttagaattatctggcccagtaatgacatacgcagaacttacagaagcattaaaagaagctactggaaaagatttcgaagtcatttcttctgatgataaaggatttgtagaaaatttagtcaatgttggtatgccacaaccagttgcagaaatgttcttatctttccaacatgatataaaaaataatcaactagatgttacttctggagatttcgaaaaagcattaggaaaaccattaacgaaccgcgtggatgcgcttcgggaattactgcaataaaataaatacgtctatcttcgcgatagacgtttttttatagttcatcctgtactagcaacgtaaattcacgggctaattgatctaaaaaatgcttctgccaatcatgatctcgggtggtgccgtgtaagttagtactaagcgtcaattcaccgcggaaagtagtagcagcgacttggaaaaacggagcatattttaaagagccgcaaataaaacaatccgttaaagtactaccttcaaaaatgagcttctcttcatcaataataccaatgtttgtaaagctcgtttttggaatagaatacattttttcagaagcttttttcgcaaaagaataacttttcttcttgaaaatcagttccaacaaataataaatccgtaaaggggtaagactgtttttttgtggattaagtgaatttttgacggcttggagggtgctctcgaatgaagttaagtcgtcatttgcgttaatttggcaggtaatattggctgttaaattggtaattccttggctagctttacctggcaaatatttacgaagatctactgggcaatcaatcgataattcattttgatgcgtcgtctgctgaactattcgtaccattgcggcaaaaaaaacatcatttacagttgcatcgttttctttcgcataatgaacgattccgtcaaaaacctcttttggtagctttgtccaaatgattttcgggtttttcgggtcacctttgagtggaaatggtgggttatagacagtttttcgatttgttttttcggtaaaaatggtttttatttctttgcgtgaaaattgatcgaaaacttgttttaaatttctcgagcctaaactcaaattggcttggtagtttgggttttccaatagtttcgaataaagttcacttaacaaataaagatattctttaaaaccagcaccatcagccaacatgtgattcaaaataatgacaagtttatcagccgattccgtacggacgacagttaagcgaatttgtggaccgttttctgtagataatttcctcactagcgcccgatttacttcagcttcgggttcggtggttttaataaggaaaaccaaatcctccgctgaaaaaacactttcttgccaaaaagcgcctttgttcgtttctttaaaatggcaaagtaatagccgaagttttttagtagactgcataactgctttttttagaacgtctatatttaaatgattatcaaatgtaagaaccgtatgcaaatgatggtcatttttcattttttctccagaaatataatgcttaatatcagaaggttcagcgggataactcgtgatttttaccatgggatttccttctttcttcggtttaaatagttgttagtagtttccctgaaagccggtttgcgaaactaaaccaagtaactccagtaaaaaagagccattctgttcgcgaacagaatggctctttttttatttatacatactttcaattactggttttagcttatcgattacaagtccgctaccgccgcgacctttgacgttttcgatcattcctaccatgaggtaattgggattgtcggcatcgaaggcataaacaaagccattttcaaggccatcttcgccttgtttttcttttagttcggctgtaccggttttggctgcgatattgtgaccttgaatttgtagggcgtgcgctgtgcctgctgggtcagaaacagttttgactaaagctgctttgacttggttagcagatgcggcttcggttgcttgtgtttccttgccagctttttcttttgtatctagttttggataaggcatttttccgtcgttggcaatggccgagtaagcaatcgcttgttgaattggcgacatcagtaattcgccttgtccgtaagacgtatcagctagtaagatttctgagttcagcccgtcatttgaaatttgtgctggtttcattgtgaaaggtaagttatattccttatcaaaatcgaattttttcaagccagcagttagtttatctttgccaatctctagaccttcttgggcgaaataaatgttatcagagtgtacaagcgcgtccgtcatatttacttttggaacatcatggacacgagtaacaaagtatttgccccatgaagcatctttttgccactgtaatccagaaatttcacggactttgtcgggtttggtaattccagtatccagcccaatcgttgcagtaatcgttttaaaagtagatcccggtgcgtaacgatttgcgtatcttgctaagaaaggaaggcgtttatcgtcattatattttgcgtaatcttcggaagtaattcctagcaccatttgatttgcatcataagaaggtgtgctcactaatgctaatagttcgccgtttgttgggttaatcattgtcactgcgccagtttcagagccaagactatcaaatgctttcttctgaacatcagcatcaatagttagtttaatttcttcgccgtcttttttatcgattttttgtaaagtatcttcttgtttggtttgatcattgataattttgattgcgccaccatttttaccgcgcaattgtttgtcatagtaacgttctaagccacttttcccaatgacatcgccaacgctgagttttggatttttttcaatgtcttcggcgctaacttcaccgacataaccaatcaaatgcgaggttgcttcatttaatggatacgtccgcatttctttttgagcgtaagtaagccctgttgcttctggaagtttatctttatttaaagtaactagtggcacaaagctatctgcttgaacccatttttgatcgagttgtttgttgatgtaatcagttgagacttctagttttttgctaatatcagcaatgtttttcactttttcatcgccttcaccaagctttgaaggaacaactccagcttcggcaaattggcctgtagttgcaagcggttttccatttctgtcaacgatttgaccacgttctgcatcatcttctgtcattcgaactttatctgttttcaccattcctgggaaaattagtgccggtttccagtcgattttccagtcgtcatcttgcttggaaatagttgttttatatttttgcgtagcgagttttccaaggcttgtccgcatttctagttcatatgttaagttgaatttgttttctttgtcatcatagactgactttaaatttttgactttaatatctttcgcaccaattccgtcgtaaacagcttgatacttttcttccatttctttctttgtgaactctacttttttcagagattcacttgagacgctatttcctagtttatcgtacttttctttagcgatatttgatgtaaaagtttctgcggctgctaaagcgtttttttcatctttatgttgattttggatgaaaaaataaatggcaatacctgcgaggacgacaacagcaacaatacttccaatgataattgctttcttgttgttaccttttttcccatttaaattagccataatacaccccttaatttcatgttatattcaattaattataccaaacacttctaaaaaagttgaaaaaattaaagaaaactttagatttgcccgacatatttttttctaattcatgtcataatttgttcttatttgcttggtaaagtagtggtaacgaaaggatgatgttggatggaagagatggaacaaccagaaaagaaggtcattattcgtgggaaaggcatccacaataaatggaagtggagcacgattattgttagtattctttctgtcataattattagtgttttaagttatcagctgtattcagttagtcaaaataccccggaaaataataatggaacgatgcaaggccctggaggaaacggtgcgccgagtggaacgccgccatctggtgagccaggtcaggcaccttcagacgatagttcggattctggaacaagtgatagtactaatagcggcagtacgctttagaatacgctagaagccctctaaaatcatgtttttagagggcttattccaatctttaaaaaatcttatggaattatcgctctctttttttgtcattttattgtaatatggaggtaagttacaataaatgaggtgtgaaaaatggcaagacatgcacaaaaaagaaaggcacgtaaaggtagaatttttggtacgattcttgtagccctattaattttagttggtgtagttgcagttataggttattttcaatatcaatcgagcttaaaagaagcgcaaaatgatagtaaattaaaagaatacaaatttaacggtgcaaaagcagttggcgatgagattaatgttttacttatcggtagtgactctcgtggcgaagaccaagggcgttcagacagcttgatgattgctcattataatacgaagacaaatacgccaaaactagtatcaatcatgcgtgatacttatgtagatattccaggtcatggcaaaaataaaatcaacgcagcttattcatacggtggtccagaacttgtccgccaaacgattaaagaaaattttggtgtagatgtgcagtattatgtagtagcaaatttcgaaggtttccctaagattgttgatacagtagcaccagaaggcatcaagatcaatgcagaaaaagatatgtcgaaaaatattgatgcaaacattaaaaaaggcgaacaagtaatggatggtaaaacattattacaatatgctcgtttccgtaaagatgctgaaggagacttcggtcgaattcgccgtcaacagcaggttttagaagcgctgaaagaacaagctattgatgttggagatgttactaaaattccagatgtcatcggaaaattacaaggttattcttctaccaatatcccgactggcacattaatgtcaattggcgcagatttcctactaggaaaaacagaaacaatggaaaaattcgcgattcctgtagaaggaaaatggcacaatgaaagaattgacggtgcaggagcagttcttcgtttagacgatatggctgccaacgcgaaagcattacaagattttcttaaataaataaagcaaaacacggaaatccattcttcggatttccgtgtttttttagatgaaaaaaagcattaactttcgtaaattgagactatatcataaattctacgcttcattttttcacgaacatgtaatggctctaaacattcgcatttatcgccaaaactcaagagaatatcatagtgatactcgttttctataaaaggaaaactgacaatgtaatgctcctcaccatcgggataaaaattttcataagagcaataatcaagcactctatcgataatggattgatgaatacgaattttaatttctatctgcataattgctacaatatcttccatttctaactgtggcttttgaaaatctcgcagtgtaaaagtgtcctcaagtatttgcagaccagacatacgagataacctgaataaacgaaaatcattcctattttggcaatacccatacaaataccagtggctgcttttcattacaagctgatatggttcaactattcttacggtcttatttccttggtgagctatatattcaaaggttagtaacttgttttcctgcaaagccactttgataatttctacatgtggttgtatgttgttatttcccgtccactggcttaaatctatataaatttggttcgcttttagctcgatttcttttgctctatcagctgggataaaactttttatttttgcaagagcatttatcagttcatctccgcgtaccatgttagaaagacttgaaaggcccataagaatagcggaaaggtctgctgttgaaaaaaccttgctatccatcttgtagtcaggcataatttcaaacccgccacctacgcccggtgttgaacgaataggtacaccagccaagtcaatcgcgtctatgtcacgataaattgtacgaagcgaaacttcaaatctatcagctaactcttgtgcgctaatacgttctttatcaaggagaattaaaacaatgctcataagcctatcaactttcatataatagccacctttcaaaattactatatattgttgccataatggtgtcaacaatcgggagctatactgaaaagtaaggaaaggagattaacatagtaatcattgatataaaaaattaatagaaaatggaggaaatatatgtttacaatttatgtttacgttcttgatactctagcagattgggagataggctatgtaaattcggagctcaattctcgtcgtttttttaaaaaagacgcaaatcgcgtatcgctcaaaacagttagttattcgaaagagcctattaaaacaatgggtgggatgacgatagtgcctgattgtgtaattgatgacattgttatgagtgaaacaagtgtattgttattgccaggagctgacacatggaacaacctagagcataaagcaattatcaaaaaagcaagtgagcttctcgctttaaatgctacggtagctgcaatttgtggagctacagttgcacttgcgaatcatggattattggataatcgtccacatacaagtaatggagcaggatttttagaaatgttctcttctagttataaagggcaaaattcatatataaatgagctttctgtatgggataacaatctgattacagcgagttctgctggagccttgttatgggccaagcaaattattgcgcatttggacgtttttgagtcaaacacacttgagtcttggtatgcctatttcaatactggtgaccctaaacacttctatgcactcatggaaagtttgccagataacaatgatcactaattaagtggagcggctaatctacaatattaaagcagattggtcgtttgctgtgtggctaactttaggtggaaaattgtcacaaagtacagggagagaattgacaggctggttttaaatttcttttttcgcgtcacatagcttataatgaatacatattttaaaaaggggtgaggcgcttcatgaaagataaaacgaaaaaacggaaatggaactgggcacagattcttgcaatttttgtattaataacgctcgtgatttctatggtttatgcaatagttaacttaattacagcaccatctggcaatgtaccagaaggacagcaaacaaaaggcgattactcacttatgcttatgcagtgtgttcttggtgtggtagttctatttctaccatcaattattagtaaaaaaatgaaattcgtcattccgaatgcgatgtatattgtttttatcgttttcttatattgcgcgatttatcttggggaagttcgtagtttctattatttgattcctaactgggatacgattttacatacatttagtggggctatgctcgggggacttggcttttcgattgtaagtttactgaataatgatgaacgggttacactttctatgagcccggtttttgtagcattatttgcttgtagttttgctgtatttttaggcgttttctgggagttctatgaatttgcagcagatagctttggaatgaacatgcaaaaaacgatgctagaagatggtacaatgctacaaggtcatgcagcagttgcagatacaatgggcgatctgttcgtagatttcctcggcgcatttgtcatctcggttgtcggttacttctccattcgtaaaaataaaaaatggatgaagaacttcgaatttaaaaaagtagaagaagacgcgaaataaaaaaatgccagcaaagtgagaaatcattttgttggcagtttttttatattattttactttctctatcaataaacatcattaaaaatgcgatgaactgtaaaaacgcacaaacaagaatagcatattggctgaaaagctgaataaagaaattaccaacgaccgcaccaacgataaaactaagaataaccgtgaaatatagcccactattacgaaggtattgcttttccttgtactcaaaataatcacataagttttgtgtagcacttcttagatttccgatacacatcgtcgttgcaacacctctaccatgcatttttcgaaaactttctacttgaataccacatacaaaagatatgagcgaattagcaattagattatgatcaagtggaataaatgcaacagcgaccaaaataatagcctctatcattacggaaagctgtctccagtgtaaacgtctaatatcacgtcgatgaattacttctgatatcgcaatcccgaccgtaaaagagacaaccggccaaaaatactgaattgcgatagcccagttcccctctgaaagattaattccgaataaaagtatgttccctgtctgtgcatttgcgaatacttgtcctctttcaatataagagtaagcatccataaatccgccagctagagctaacaagagccctagccctattgattctgaaatttgccttgaacgtaccataacttttcatccttttttcttatttattaagcaattgcgcgcgaatcgtactaattaagtgatttacttgatcgatattttgcaacattttcttttcaaaatggtgaattggcaggaatacgcaaagttcgtctgcattatccgcagtttcttggccataaaaaatcctgcttgatggaatgatttcttgaatttttaagaacgtttcccaaatatcagcataaacttgagcttctgtcattccaagcttaagcgtgctaggaagagaatataaaacaagtatcccacgtttcttatttattgttttggtcgatatagtaaaatcagactcataggaatgaacaatatcctcatcgtctactaaataaattgcagtttccgaattagaaagctccgaatgaaaaatttcttgaaacttttcgaattcgcggttagaaacttcttcattactcgcggtcaaagtgccttgttgatctgttaaaaacaaaggagaatggctggtttttccagtcagctttttaggaattagaaaagcctgtctaagaagttcgaataaagtccttccgcaaatacctaacaatagcgcacttacatcactttgttggtaggcggataaaataattttagcaaaaagcgaatcctctttttcaaaaccacgcgtttcttggtagctctctaaattatctagaaatacatctttaaaacgtctacacgctgttggattagctaaaatctgcgcaaataatttagttgtattttcttctctaggaaaaatagttgtcatttttttgctctcctttgttttttatagtacaccaaatcaactcatttaaaagcaattcgaatatattatctcatatttaccaagaaataataaaaaattcatagaaacaagcccataataattcatgggctcgtttcattatttatcgtgtttgtttaaaagcgcgataattctctcagtaagctcgatttcattttgcttcattcctttttccgcgtcattattactataaacctgagcctcataaatttttgttagctcggtaaagtcggcggttttcagctcattatcaacacgtattgcaaagtggcgtaacgtttcacttggctcgcgaacataaccataaactgcaagagatttcattaatttatgatatgttttactgaattcaggtgcttttgatagtgatcgaagtaataaataactacgaattctgcgtctaaatagaacgacgagaacaagtaaaacagcaactaagccagtaggaatccaccagaaccatgaaggtagtttgaagcttgaagttgagtcggtttttggttgttcttgttttggcgtttccccagtagagctacttccagcttcttgctcaggtgttttatctggttgagctggtgtttctggagtactcgtgctgtcatttggtgtttctggtttattggcagtttcggtagttggctcttggaagtcttccggatttgtaaaggtagctgttggctcaaatggaacccatccagttccagggaaaaacacttctggccaagaatgtgcatcgttatttgtaatggtatacgttgatttagagtcgtttccttttttctcgccttcacctggagtgtaacctttcgcccatcttgctgggataccaagcgaacgaagcattaccaccatggaagtagaaaaattatcgcaataaccaatttgtgtttcaaataaaaattgatcgacataatcggctccattaggcgtttctttcgcatcctcagtactatatgtgaacgtacctgaagaacttaagtagctttcgatagcttttgctttatcgtaaattgaatcagcatctttagttactttattggcgagttttgtaactcggtcaggcagttcttttggcatttgcgtatattttgaaacaaatgcgctggataaagtgctgaaatcagctttttgcattttttcgatgtcgtaaacaggtgatttcatttgaatcgtgtaatttttgattgtatctacaggattaattttttcagtcgttaaattggcactaaatgaatcaaccgcactattaattgtttgcgttccatatggatatggaatgtaatcacttgatgaagcaaaactgatttcggctgttttggtatctccagttgtttgttctgtaagttggataggaaagtcatcaccagaagagaaagacgttatgtctgctgatttttcgttcgcccagccagttccagtataaacacgttttgactcaacgcgccagtagtgccctttttccgtacgagcggtaaatacggtagcattatctttttggagtgcgccaccaagcgttgtatcgtcttcgctgtaaccgactgtgcgagtagtattgattccaagcgcatttttaatcgtcggtactggatcagggaaaacgggcgcttttttaggtaacattagcgaactaaaaacaaatactgcaagcaataggactataaagacatgataaaataggccatttcgtttgagtgaatccgcgctaattcgatttggagacgcaattcggctcgaaagcgcaagatgtagcaataaaaatccttctaaaacagttcgaacaattgcccaattactattataatctgtaaaagtattaataactgccaaataactgaccgttaaaactaacacactcataatccgttgttttcgcaaaatactataagttgtaatatagctaagcagccacaatgcaattaaaaagacgattaaaataaagttcatggcaatatccgatgaacggaattgaaccatatctctaaaaccattaaatgtgatttggaaaaaagaactaaaccaattcatggaaaaaatactatctttagcataataaattcccgaaaccacgaaaatcatgattaaatgaaggggaatcgtccaataatatttcaaacgaaggaaaaaactaccgagtgaaatagttataaataaaataatccaatttggagtagatagttctgttagctcagaaaatgggtaaatccactctgaaattagcaaaacagataagataaatagcaatacgagagataaatatcttttcatcgattttcacgctcccatctgctttcaaggctagcgggctcaaggtaaatcgctggaatatcaatagctttagcatgttctgattgaaaagtaataatctgtaattgcttattatccgttaaccgtgttactttttgcattaacattgtatctatacatggtgtgaaaagaagaattttttctccagcatgtagattgctatcaagtgattcttggagcgacaaactatcgacaggtgcaatttcggcaaatgctgtcgaaatgtcttgaagtcgatttgtaccttttgaaggagcgaatttacttatttgatcgcctaaaagagtaacacgaatttctccattatcttcggagattttgcgaataaacgagtaagacgcccgaagtgataattcaaaattgggatggctcgctccgtaaaaaataaccgacaaacgcgatgtcgcactattttcaaattctcgagtcattagttgatcgcttttcgcagaagatttccagtcaataagggaaatccggtcaccagaagaaaattcgcgcaaactgtgcaaattgctgtttttcttaagcgtccagtaagcggcgttgcgttcgttttctggagaagattcactgattttttctagtacgtccggaaaataggttggataaatagtgagcgttttttcggaagatagttggcgcgaacgctctaataagccaaaagcatcgctagtttctacatcaacaggtggaaatgaatgaatcccacgaacacctacaaatccagccaatgtgaccgtgaaatgctttttaaaaagcggataaaccacttgttggcgggcgctcacattgccaaaactagcgggtattttttgttggaatagcaaataacccaccggataacgcgattttcgagtgaatgatacttgcatatcaattaaatcgccatcatgataggtatttttaacaaaactccgattcactttccacgcttttagtggataaatcgaggataaaaacaaaaataacaagataaaactgaaaaagtaggttaaaaaccagctagctgtatcaccttgaaataacgtataagcccaaagtccagcgtaaataattagcataataatccaccgagatgctaataagagacgtttttttaacatcttgttacctcttctctaccgggactgacgtgtttttcagaatggaagcaataatggattcggctgtttcttcattataataagcttcagacttcaaaatgagacggtgggtgaaaatataaggcgctaaatactgaatgtcatcaggaataacgtagtctctgccttcaataagtgcaaaagcttgagctgcttgcataaatgcgagcgagccacgtggactaatccctagcgcaacagacggatgtttacggctcgcatctactaagcgaataatataattttttaaaacatcatcaataaagacttgttttgctttattttttagcgttactaattcttctaaggttactacttgtttcgtttgatcaagtgggtcttggtattgttttaaagtaagtagttgcatttcttcttccacagtcggataaccaatgttgattttaagtaaaaaacggtctaattgggcttctggcagtgcataagttccttcatactcaatcggattttgtgtcgccataacgaaaaaagggtcagcaagtttgcgcgtaataccgtcaacagtcacgctgctttccgccataccttcaagtagagctgcctgagtgcgcggtgctgtacggttaatttcatcggccagcacaatattacccatgactggacctggacggaactcaaattcacgagtttctgggttaaaaatcgaaactccagttacatctgccggtaataaatctggtgtaaactgaattcgtttaaaggaaacaccaattgtttttgctaatgtacggaccatcattgttttaccaacaccaggaacatcttctagtaatacatgacctcccgcaagtagggcagttaagcttaatttaacaacatgtcgtttaccgacgataactttttcaacttcattaataatctcatttattttaatggatggctctgtagacataatttgcctccgtttcttttcatgtgtttttagtcagaatatgtttattcatggtttaatgctactataatcaacctggaatgtaaaagatttaaggtggcatggacttttctaaggagattgtttacacttagaataactggaggtggcgaactttgagcgtaaaattagcagatttaatgaaactaccatctttaaaagaagcgaaagtagtctctgggaaatcaggattatctaagcttgtttcgtctatttctgttttagaatatacagaggtagctcttttagaagatgatttatttgataatgatgaattttatggcagtgaaatagttgtatcggcttttgtgaatattagggatgatgtcgaggcgcagtgtcgcacgattgaacgattacataaggtcggagaagttgctttaatactttactatgttggaatatttgtcccgaaaattgaccaaaagctagtggattttgcaaatgaactcgattttaccattattgttatgccagaaaatgaaatgtcgcttaggtatagtgaagttatttatgaagtagttgaggccattgtgaaacaggaaatgacagacactaattttgtaaccgagtcactagaacaaatttcaagcgtaagaccgccgcaacgtaacattgatacgacactgaaaatcctatctgatagaacgcatgtctcgcttgttttaacggacaattccttccaagtcattaattccatcacttggccacggacccggcactgggattttgaaagagtaattgaagcatcaaaacatataaacgagcacgaacttgtccagctgaccctagacgaacgagatttttatacagctaaaagaccgatttttcaagatggtatgcaggcaatgcacttatttatgatgaaagaaaaaggagcattaactatcgacgtagctatgcaaattagcgaggttgtccaagtatttatgaatttatggggcaaaaattatgtcgaaattagtacaaccgaactaatgaaggctattttgaatgatgaaagtgtcaagatgcgccgacttggaaaaattctaaatgtcgatgtttcttctattaaatggatgtggcttgtaaaacctgaagctgttcgtgacaatgaactagtattaaaggaactgaaaagctatgtttctagtcatttcaatgtttcgctgattgatttatttgaagataatatcgtcgtccttttagataattccgttgcgcaacgagacaggacgcatacggctcaagcattttctgaaatgatgcaggaaatcgggatagctttaaaaatcaccgtctgccaaggtatggaacaaacctcagatgtccaaaacgcgtattcgttagtaaatgaatacaaaaatgcagcgaatgcaatttatgctaataagtcgatatattcgctccaagaattcgattttgcaacgaaatgcgtcgaaatagtcggtcgaggggaactcgcaattgcggaacaaatgaaacctttaaaaccgttggaagaaaatgctgagttgattgagacgctttcggtatttttactagaaggggaatcgaattataaccaagcagcagacatactatttctccacaaaaatacgattaaataccgaattcagcggataaatgagttattgcaatacccagcaacgaaaattcccgagtcttataacctttatttagcagtagcaattcggcgtttacttggcgaaacaaacaataataaatgaaaacagcgcggtttttgtccaaaatgacaaagattgcgctgttttttttcaattctgataaatacaaatgctagctagttcttatataattagtcattaatacaactatttcaagaaaaggggcgaaacaaaatgacagagaagaaaacagaagagcaaacacaatcctggcagagtttggcatttgtatggaccggcgcaatgatatgcgttccgagtcttcttgtaggaggaacacttatttcaggcatgcctttatgggaagccattttaatagcacttttaggatacggcgttattgtcttatttatgatatatcaaggaatgcaaagtagtgacttagggattccagcagttagcgtagcctcacaggtttttggggaacaaggatctaaaaagattatttcgattctactggcgattgcttgtcttggttggtttgggattcaagccaatgtttgcggggccgcattttcacagtttttaggaatttatggtattaatcttccagttccaatttcttccttgatttggggagttatcatgttactttcagctatttatggtattcgaattttgagtattttaaattatgttgcagttccgattttacttttcgtatgtatttatgggttaatagtttctttaaacaatggcggaattgcggttgtggaaaattacaaaccagcaagtagtatgtcgtttatgacgggtcttgctattacaattggctcgtttgctttaggagcagttattgcgggtgattattcgcagtatacgaaatcacgtaaagacgttgtaaaagcagctattgttgggattttgccatcaggtgttttaatgattgcggtaggcgcggttcttgctttaacagcaggtacagcagatatttctgtcgtatttactaatctagggttaccagttcttggaattatcggcttgatccttgccgcttggactaccaatgcagtaaatgctttctcaggcggaattgcaatcatcaatgtattcaatatctcagaaaaatatcataaagtagcagttgcgattgctggtggacttggtactattctagcagttattggaatcttgaaccactttgttccgattatgtcggtactttcggcgatggttccacccgttgcaggagttatgattgcatcttactggattgttcaaaaaggtgataaaaccaaatgggcaccagtatcaggtgtcaactggcttggtgtaacttcttggttagttggtgcagtcatcgcgggaattccagttattttaacatttttcccgacgctaccacaattaccaaaccaaccacttatcggcattatcttgtcactagctgtttacttagttggggcaaaagtgctgagcgggaagacgaacaatgtagaaaacttggagggaaaataaatgcgttatttagatgaacaagctattgaaaatatcgcgattggtgccgcgtttcttggcactggcggcggcggagatccatatataggcaagatgatggcattaactgcaattaaaaaacatggaccaattaaacttttatccccagaagaaattgcagatgatgattatttcattccagctgcgatgatgggggcgccgtctgtactcattgaaaaatttcctaaaggcgacgagttcgttcgtgtatttgaaaagttaggtagatatgtaggcaaagaagtaaaaggaacatttccaatggaagctggcggagtaaattcaatgattccaatcgttgtggcagctcaactaggtttgccaatggtagactgtgacggcatgggccgagcttttccagaactacaaatggtgacgttccatctagacgggatttccgcaacaccaatggctatcaccgatgaaaaaggcaatattggcatcatggaaacaattgataataaatggaccgaacgacttgcacgtgtgacaacggtcgaaatgggcgcgagttctcttgtgagcctgtacccgtgtaacggcgcgcaaatcaagcaaagcagtattaaaaatatcgtgacactatctgaagaaatcggtaaagtaatccgcgaaacttcgatggacgaagcagaaaaactacaaaaactattagatgtaacgcacggttatcatttattcgaagggaaaattaccgatgttgttcgggaaacgcgcgcaggctttaactttggtcgcgtgaaaatcgacgggctaaacaaagacactggtagcgaagtcatcgtccatttccaaaacgaaaatcttgtcgcggagaaaaatggagaaccgatagcaattacaccagatttaatttgcatggtagaccttgaaacgctgatgccggtaacgacggaagcgctcaaatacggtaaacgtgtccgcgtgatggcactaccagctgatgatgcttggagaacggacaaaggtatcgaaacagttgggccgcgctatttcggctacgatgtcgattttgaaccactagaagaacttgtcaaaaaggaggaacgccgtcatgtataaaattggaattgacgttggtggtacaaacaccgatgccgttattttagatgaaaatcaacaactcattcatagtgtaaaaatgccaacgagtgaagatattgaaacaggaattactgagtcacttcatcgcgtattgagcgaaacgggcattgatcgctcgaaagtaacgcacgccatgcttggaacaacgcagtgtacgaacgcgattgtggaacgtaaaaaattagcaaaagttggcgttcttcgtttaggctatcctgcaacagcatccgttttaccatatacagcttggccggaagacatggttggctttttatctggaaaatataaattaactggtggcggctatgagtacgatggtcaggtgttatcagaaatcaacgaagcagaaatccgtgaaaccttagctagttggaaaggtgaagtggaatccgtcgcagttgttggcgtcttttcttccttgaaaaacgatcaggaattagctgttcaaaaaataattgaagaagaactaggcgcagatattccggtttcgatttcctcttccgtaggttctgttggactgattgaacgcgaaaatgcgacgattttaaacgcagcccttttcaaagttattgcggcaacgagtgatggttttgaaaaagcactagaacaagaaggaattgagcacgctgaaatctatctttgccaaaacgacgggactttaatgtcactaaactatgcaagacaattcccgattttgacgattgcctgtggaccaacgaacagtatccgcggcgcatcctacttggcgggacttaaagacgcgatggttctcgatgttggtggcacgacttctgatattggagtactgacggatggtttccctagagagtcctcgcttgcggttgatgttggcggagtgcgtacgaactttagaatgccagatattatttccatcgggcttggtggaggaagtatcgttcgcgaaaaagatggcgatataacaatcggaccagatagcgttggctaccgtatttccgaagaagcactagtttttggcggtaaaacgatgaccactaccgacatcgcggttcgtctagggatggctgaaatcggtaaccctgaattagtcgcacatatcccaaccgattttgccgaaaaagcctataaaaaaatcgctgacatgaccgaagatgcgattgataaaatgaaaaccagttcggggagtgtaagcctggtgcttgttggcggtggtagcatgattattccagacgaaatctctggtgtcgcacaaattttccgcgacaaaaacggcccagtcgccaacgcaatcggtgcatccatttcccaaatcagcggacaatatgaacaaatctacatctattctcaaatcgagcgggaagaagcgctccaagatgccgagcaaaaagcaagagaacaagcaactctagccggcgcagtgactgactcgattgaagtggtggaagtggaagaaatcccattggcgtatcatccgggtaatgcgaccagattgcgcgtgaaagttgtgggggatttggtttaagaagagtaaatagtggagcattgctgacttcaggctggaactaaagtaatttcttactttagttccagctttttttataacgaataggtgattaatacagcttctagccataaaaaagccagaaagcaattagtaacaatctctttaaacgacattgttaaggttcagatttgctatataaatattttagttcatttatacgtgctattcttttattaatcagttgtaagaacttgatataagaaccttaaaactaattgtacaataaactcataaaatgaaggaggaactactaatgaaagaaattgctataagaaaaggcaccgcaactaaaaaatgagaattaaaaaacaccaaatgttagattttaaggtctaactattggtgattgaatcaaatcgtccaaactttatggagggcattttttgttgttttgactgttcaatagcaacacctggtttcaaaagcaactgcaaaagacagtgcttcataaacgcccatgggttatcctttctaggcaatcctaacaaaaaatattcataagcatcaccctttcttgcttaaggagctagccacttgcttactccttaagtatatcattgatattaaatgaaaaaaggttttatactagcgatgaatattaaaagttataggcacccctttttaagcaggacatcaagtgataaaatatagttcgtgaagtatttattaacgtcccaaaaaaatagcttaaaatggaggcaagggtgattatgacaaataaaacattggtttgtgaattcttatacatagaaaaggaaatgaccccaagtgagttctttttaaagaattttgatctgcaaaagacggtggaaagtcatcaccaagatgggataatcgatatttctttaccatctctcaaatttaattataataaccaaagttataaattgttatataatgaaatagaacttaataataatgtttatagtatatccatctctcttctttatgaaaataataaagaaaaacatgcaattatcttagataaagtgatgggatttataaataatagaagaaatcacaattttaatttaatattcaccagaaatgatagtttaaagtatttttcaataagattatataaactactctatgattttgaaacaaacttacgatcattggtcaaaatcatgttgattcctgataataaacaagaatggcataaagtgataactagtaaagtagacgtaacaacaaagttgagtaagacagctaaaatcgaaaaaataattgaggaattaagtatcactgatttagagttaatgttatttgacaagacgtttccaaagggatcaaatttatttgaagatgaactatctagaaagcaagtagaaaaattaactaggcaagaaataattaacgttattaatattaatagaccagcctctttatgggatacatactttagtcattatattgagtacgatgtaatgaatgccatgaaggtaattaaaactactagaaataatgcggctcattacagagaatttgatagtgaacaatataaagaaacacttaaagtacttaataaggtaaatcctttgataaaaaatactattaaagaattgcaatctttggattccgatgtattaataaaaatatcccaagctatggaggaaaaagtcgcgaatgtgtttgaagagatttctaaaaacacaattaatcttactaaggatttgaaaaaagcattattaaatgacctttcgaacgatttgaatcctttaaaaagtatggtaatccctatgaaggatatttaataatgaatctaactcaatgactttgagttagattgatgaaaaactttataaagttttaattatataagtaaaacctctcgcataccattctcttgaaagagaagtgaaatgaagagtataaaatatcgtactttgaagaaagtggacgtttgtagatgaatcaatccaatgaggtttgagacaactaaatagcttattattgaagaacttgtatagatcgaaaagatcaggcagaatattaagtagacattataatgtgttcaggtatcaggggagctgtgctaataccttttttgctgtgtataggttatcattctacggcacaagatggtaaaataagattagtaacggggagtgccttttgtataaagttaggtagtaggactttttcaaggagacacatataaaatttaagtcgttaggtattataattcaaaggggaatataaatgcatactaggattagcaatatgatagaggcgatagatagagagagcaaaaaaaaaggaagcgaaggggctgtatttaataaaacggtatttcatatacatacgcctgcttcacatgatttcggactttttgcaaaaaatgatacagataaaattacaaatgagcaattatttaataaattacttgatgatggttttccattgaagaagaatattcattcaatagaaggattgaatgaagtcaattcaaataatgttttcgataatggtattgagttagctctattttgtttgcaagctaataaattatctgtaaacaatgtcaaaatggcacttataacagatcataatacgctttctggtgttagtaaaatggtagaagcatgtaagataaacaagcgatttttaaataataaatgtcctcaaatattagctgggatcgaaataagctgttcggataaacatcacgtagtagtgatacttaataataaagacatggacatgatgcaaaaggcagaagattggttaacgaattatattatctcagatgatggaacatatttaccatccttacttgttattgaggcatttgttgagattggagctatagcttatatagcgcattttaatacttcagatttatttaaaaaacctaaatttttaagtggactttatatagataaattattttctaccaaaaaaatggaaataattggcttatcaaatatggatagtaagctagctattgaggaaaaattatctaactacaccaaaagaaagtttcattttattttagacgaggattctcatactcttgaagagttatgtactaaacctttttggattaaagcacagtcattagattttaacgctattaaatatgcgttaaatgattttgacaattcaatttccttttgtgaacgtcagatgccctcaatttatattaaatcgttgtatatagaagggaagacattcattaaaccatcaaataaaaaaaataaaggtgtagtttttacattttctccaagaatgaacagttttattggtggaagaggaagtggtaaaagtacagtgttgaacacaatagaatttttaatcacgcaatatattgaaagtgaacatatatttgactccgttttgcctcagggagatttatgcctttgttgtgtatttgaaggagaaacatattatattacatctttaaatgctgaagatgaagacaaccaaagatttaggaataattacttttataaggaatctagattggaatataaaaaggtatctgaaacccagaagagaaatgaagtttttggaagaattgaagtatggaaaaaatgtcgagacaatggctactatgaaaaaataactcgaaaaaaagcaattcttgataaaatgtttacaagaaaattttctgtaaataatcttgtttccagtgctcaagacagtgataatattaaccaattcattataaacatgattgaactagaccgaatcttaaaaaagaaaattaaattatcaacaatagacactaaaaaatggttcgaaatcaaaaaagcatttcaatcaatagaattaaaattaaatagtcatcgagataaatatttatcgacaattaatgaatataataaaagaaataacaatagtgttaggctaatttatcaacaagtagcagttgagaattttgtatatgcttgggaaaatacaatgtatttaaacaaattaaatgcaacaaaagatttccataactataatattagtttaggtgaggtagtgaattatttgcgtgatctatcaaagaaaattaatccttttaatgtcattattaaatttcatgaatggaaatttgatgaattagatcaaatttctaacattactgattttttgatgagtagaaataaaacattagataacaatttaattgatgtaaacatacctgctaataaaataaaattatttaaggaattaagaaagagaattaatcaatctttttcttatatgatagatgagttggagagattctattctcatgtagacaggtggagcttagaatttaatattaataaccgtactggacatgataacagaaatccggattttaggacaataaccgagttatcattaggtcaaaaagtagtagccatgttgaactttattctctcctttagtgagtttgaaggagatgattcaccattaattatagaccagccagaagataatttggataatcaatacatttataataatttggtaggactttttaagaatctcaaacaaaacagacaagtaattatagcatcccataactccaccattgtggttaatagttcaactgaattagtgtatgtaatggattcggatgctaataacggctggattcaaacaagtggtttttgtaaagaaaaagtggttttaaacaaaataataaatacattagaaggagggcagattgcattttcaaataaaagtgagttgtatagtagcgttactaataaaaaataataacccaagaagatggttaaaaaacttattattcaatttagatacgaatactgccaaattggattaataagtgttagtgtataaatgaaataagagtcatacactaacatgaatctcaaatacaagcccgtttatgatgaggactagccattatgataaaatagccactaaaccattcaaagtttataagtggttattttttgttgtttggactgttaagtagtaaaacactttttgtacaagcaactgcgaaagacagtgctttataaaaggtcattatctatcccttttcagggagccaacaaaaatataattaggccacctcatttagtaaaaagaatactagccaccatcataaacagtgcttattggtattagaagcatgaagaaaaaagcatgcaaatgatatataatgaataaatagagaggatggaatacatgagatacataatgattgatactaattacttttgtgagaaaaaatttgatacagaaacaatcatattgaaagacttcaaaaaaatgattgaagagcaattaggtacatttttgtataatgatattttaattggagaatatgaaagtaacttagaaaaattaacaaacagtaccagagaagcgtttaaagcatttttacgtaataaaagcactttaaatgatgttatacctatgtttgggaaaaaaagacttgaacaaaaagttgcagaatatgaagaaaaatatttaaaaccttatgcagatagattttttgattatatcgagatgattaacggaatagatataatgattaaggatatagatattgaagtactttttgataaatattttaatggagaaccaccttttgaagctaataaaaataaaaaaagtgaatttccagatgctataattttcgaaagtgtgctaaattggacagaaaaagaatcaaaatttaataagtttacagatttgttatactttgttacaaaggataacggcttaaaagaagcatttgctcctactttggttcatgttgtagaagatttaagggattgcttaattagttcactagcagaagaggtagaaagaaatatcagtgaaaatattgaaagtgatgaatttaattgcgcgttaaatgatttgttagaagaaaatataaaagattttcttatggaaggatatctagatcttgataatggagaaatagaagcagaggccctgagatataatatagcaggaattggaaatatggactatgatttgttggcagcaaacaaagatgggaaagaattgaaaattataatcgccatctcaaatgtggatctagacttaattgtaaactattccgaagtatacccagaatcaggatactatgatagagagactggcgaggtatttggcttagaggtacatgaaacaaagcgtaatataggggtagaattaaagctagttgtagaattatcaattgatgagacaagtatgctctctaaaagattaatgtgctcaatagcagatatcgagactgaaactaatcctatattaaaggaagatttgtacaattatgaatacgatttaaaatctagcaatgcttctgtgttaattgatatagaagatatacaattaaatattgaagaaatggtaagtccctcagaatatttggaagatcctactatgttattttaaattatttcttgtagtaaataatttcgtccaatcttagccaatgacattgagctggattagtaaagcacattcaacagattataaaataataaagagaagacaaaaaatctgttttctcttattcttcgtttactttgaatcttacttttctaattgatgcgaaagaatttgtaagattgaaagaatacaaaaaaggggtgtattaaaatatacataaaatactcattataaaacagacttctttgtgtgtaattagggggtgtattaaatgttttgagaataaatgtttttagtcatgaatgttgtatactattgagtaagcagtaatgattaaaaatttaaattgaaaatcgtagagtttaaacatcgtggtgctgaaaaattatttatcgaaaagaaatcttgcgcagacattatagttttcgtcttaaaataggttgttcatgataagaatcgaacatttcattacattttttgcttatacattcattttctgtgctatgcttttagtaggaacaaatattctaccaatggcacatccaaacaaaatattttccctgaatacggtatgacaggaagccgatatagtaagaacccgacttactgttcaaagattgtacttcaagcctattatttcgaaacaagaaataagcctgttgtgcaagtatttccgtccttagttactgtgtatgatttaccaaactatttttcaaaagcatataagccacaacaagtgaaatactttaaataaatctcatgtattaggaagtgtcgctgaatgaaaaagtataaaaagtggtggataacgattggattagtgttaattctttgcattatcggatatatttattggtttgcaatccctaaacatacagcaaatgaagcagtggatgattacatagcagcgcaaaagataaattcaacgcaagttaaaacgagggatatttaaaaagattggactagaggaggatactatgtcacgatagtgtttaaggatgaccctaatttagtgtatgaatacaactacaatagtaaaaggaatacgccttaccatattaatctacttgtttttaaagatggctcgagtcaagaagatgaccaagtgaagcatccaccactacaagagcaaaaggattaaagcagaaacccaagcattttaagtaagcagtgctactactgcttacttttttgtattacttttatgtaagctcggcataaaaagtatcacgccaatcgaatgatcaagccggctaaggtcccaaagcggatttactaaataacttgagataccttaatgcacacgagctagtcgggaagacaaaaagctttggattggttcaactaaaatctatcattttcattcaaagagataataaagcaccaacctctcccatgttttccctagcaattccaaccccacctgagatacaattaacccaaacaaacgaaacggggcggatgccatggcggaatcactcattactaaaaaagcgattgctggtgggctgatggagctttgtcagcataagcggtttgaaaagattagtattgcggatattacgaatatttgtgggctcaatcggcaaactttttactatcattttacagataaatacgatttgcttacttggacctatgaaaatgactttttccattgtttggcggatgggattacgcttgaaaattgggataagcatgtgctgaaaatgctggaatcgattaaagaaaatgctgatttctataaaaacacggtttcggcggatgcgagtatcctttctttttgcttttctaaattaacgaattcgctgtttatggatttatttgagaaaattgatacgaatggagccgtgaacgaggcagatcgggtgttttatgcggaattcttttcttacggatgctcgggtgtactgattaaatggattacgcgcggttttaaagaggctccggaaacgattgcgaaccagctatttcgacttgcaaaggatacggaatttttggcaaatagcatgtaccgcgaaaactagacaatatggctaatttgtctaaaaaccagacataagcgttcttttgcccagattaaaagcgaacgaggcgaggtatactatctgtatcaagaaattggaggagatagtgatgaaaaataaaaaacgtacgctagtcgctctaactggggctgcaattggaacaggtattgccgcaaagaaaatttctgaacaaaaggccgctgaaaaagaacgggcagtggatgaagcaattaaagcgcgctattacggtgacaaacaagtgtatttcgtcggtggcgggattgctagtttggctggggctgtttatttaattcgcgatgccaattttgatgggaaaaatattcatattattgaaggtatgcatattttaggcggaagtaatgacggagccggaagcgtggaacatggctttgtgtgtcgcggtggtcggatgttgaatgaagaaacttatgaaaatttctgggatctatttagtagtattccgtcgcttgatatgccgaactttagtgtgactgaagagattttgaactttgaccatttacacccaactcatgcgcaagcgagattagtggataaagatcgtaatatccttgatgcgcattcgatgggatttaataataatgaccggatgttgatgacgaaactgctcgctactccggaagaaaaactcgataatttaacgatacgtgattggtttgatgaacactttttcgaaacgaatttttggtatatgtggcaaaccacttttgctttccaaaaatggagcagtttgtttgaatttagacgttatatgaatcggatgatgttagaatttagccggattgatacgctggaaggtgtaacgagaacaccgctaaaccaatacgaaagcttgattttaccgttaaaaacatttttagataaacaccatgttgattttacgattaatcaaacggtggaagatattgatttcaaagatgcgcctggaattaccgcaacagcacttcatttatcggatggatcaactatcgaacttggcccggatgatgatgtgattatgacgaatgcttgtatgacagatagcgcgactcttggtgatatgaatacgccagcaccaaaacctgaagaaaaaccaatttctggggagctttggtataaagtcgcgcaaaagaaaccaaatttgggcaatccagagccattcttcggtcatgaggaagaaacaaactggcaaagctttaccgtcacttgtcatggtgataaattattaaaacgcattgaacgcttcacagggaacattccaggaagtggcgcactcatgactttcaaagattctaattggttaatgagtactgttgttgccgcacaacctcattttaaagcgcaagatgcaaatactacgattttctggggttacggattatatccagaccgcgtgggtgatttcgtgaaaaaaccgatgaaagaatgtactggggaagaaattttatatgaattaatgtgtcatttgaactggcaagacgattttgaagaaattaaagcggatattatcaatgtaattccgtgctacatgccatatatcgatgcgcaatttgaaccacgggcaatgagtgatcgtccggccgttgttccagaaggtagtacaaactttgcgatgattagccaatttgtggaaattccaaaagatatggttttcaccgaagaatattccgttcgcgctgctagaatcgccgtgtacacgttgcttgatattgacaaaaaaatctgcccagtaacaccacacaatcgtgatccaaaagtgctagcgaaagcaacccaaaccatgtttagataaagttgaaaagtagctatttgttacagaatagctactttttttgtgcgagacaggacaaacgactgatatttacgaaatagcattgcttgtgaaccataaaacagctataatctttatagacgaaaacaagacctgaaaagaggctgaacaatggaaaagagctccatttacggattaacatggacaaaattaacagaatggctagaagcacacggtcaaaagaaattccgcgcgacacaagtgtgggactggctttatagaaaacgtgtcaaaacttttgaagaaatgagtaacgttccaaaagaaacaattgaacttttaacagcgaattttgtaatgaacactttagaagaacaagtagtacaagaatctacagacggcacgacgaaatatttatttaagctgagtgacgggaacttaattgaaaccgtaatgatgaagcaagaatatggcttgtcggtttgtgtaacgacccaagttggctgtaatatcggctgtactttttgtgcgagtgggcttttgaaaaaaagtcgcgacttaactgctggcgaaatcgtggaacaaattatgaatgtacagcattatctggatggacgtaatttggaagagcgcgtgagtcacgtagttgtaatgggaatcggggagccgtttgataattacgataatgtgatggatttcttgcgtgtgattaatcatgacaaaggtctagcaatcggcgcgcgccatatcactgtttcaacaagtggtcttgcaccgcgcattattgatttcgcgaatgaagatttccaagtcaacttagcgatttccctccatgcgccaaacaatgaactgcggacgagcattatgcgtattaacaaaacctattcgatcgagaaattgatggaagcaatccattattacgtgaacaaaactaaccgccgaatcacttttgaatatattatgttaaaaggtgtaaatgaccacaaaaaagaagcgctcgaacttgcggcgcttctcggcgaacatcgtcatttagcttatgttaacttgattccttataacccggtggacgagcatatcgattatgaacgtagtacaaaagaagacgtactcgctttctatgatacccttaagaaaaatggaattaattgtgttattcgccgcgaacacgggacggatattgatgccgcgtgtgggcaacttcgtagtaaacaaatcaaacgagttggcgtgcgcgaacggatgaaacaaaaacaagcagcagcggaagaatagtatgtaaactatctggtttccatttggagattggatagtttttgtttatacttaaagtacctaaagcaattgaaggaggacaaaaatcatggaagtagaaattgtcgaacgaaatgcttttacagcggtcggaaaaaaacgaactttttcggttgaaaatgatgcgcaaaaagaaaaaatcagccaattttggcaagaagcaaacgcaaatggcgatgctgaacgaatcaacgaattagctgaattcgcaacaattgacggtattttaggcgtttgccaaatgaacggagacaaaatggactattatatcgcgattgaatccgaactcactccgccagaagacatggaaaaactaaccatcccagcaagcaaatgggccatcttcaaatcagtcggcccattaccaagctccattcaaaaagtgtgggaatacatttacggcgaatggttccacacaagtaactacaaccacggaaatgctccagaactagaagtctacacagaaggcgacacaactgctgttgattattattccgaagtttggattccggtggttgaaaaagaataatcattaacaagaacaaatttgtggatactcaaatttgttctttgtgctatttttacatcatgataaacagaggtgatttaatgacaacaattccactctcaatcccaatgactatcttatttgtagttgtttttgaactagtatacttaggctttaaaaaattcaatatttcaaaatctactttgggtacctacatgtttgtagcgtacttggctattttaacagaagtagttttattgccgtttaatctaacagctgccggagaaacctatccattagaggcttacttacaaataattcccttccaaaccatactattttatcttaaaaacatcccaaatctacacctaatgatccagtttttaggtaatgtagtcctacttgttccatttgctatttatattaatcggtttaaaaatatttctgttttaaaaaatatagttttagctttgggaatttctttaattatcgaaattagtcaaggaatcttaaatttaatcacacaatatccgaataatattactgatatagatgatgttattttaaacgtttcagggtatgtactcgcttggctcattttttcatcatttaaatcggataataaccgccctaaacctgtttcctaaaattgacattgagaatcattatcaatataatggagggaactagcctattatacatacaatacaattatccaagggggatttaagaatgattattgtaactaatacgattaaggtagaaaaaggcgcagcagagcacgttatccgtcagttcacaggcgcaaatggcgacggacatccaacaaaagatattgcagaagtagaaggtttcctaggcttcgaactatggcacagcaaaccagaagacaaagactatgaagaagtagtcgtaacaagcaaatgggaaagcgaagaagcccaacgcaattgggtgaaaagcgactctttcaaaaaagcacacggcagaacaaaagacactagagaacaaagagaagaccgcaaaggcatcgtaggaaatgcaatcgctcgttttgaagtggttcatgtgcaaaaccctgtgattgttgaaaaataagaagtgagtgaacaagccgtttcgaggtagatggcttgttttttgttttcagatgagaaaataaatacagtgcttttctttcaaaagcccctttactagcaacccacaatccaatcatgctataattctctaaatgataacgtttatcatttaagggggaattaaacatgattgaaaaaacaattatggaacgtcgcagcattaaaaaagcgaacgatgcgccaatttcaagagaaactgtgaacactattttagagcaagctgcctatgcgccttttcatagcaaagtagagccgtggaatgtatacgtattgcatacacttgctgaaaaagaacgttacatcgagaaaatcatcgaatttaatgagcgcgaacaaggggttagtttttctgaagcagaggttgcggatttaaaagcaggctatgcgaagaaaattattacgccgccttacttactcattgtgacgacgaatattattggtcacgggaaaaaggatttcgaatcaatcggggcaactagtgcatttatccaaaacattcaattacttggctgggaagcgggaattgggatgatttggcggtcgaatagatttatttttgatgcgaagtttgcggaagatttaggtattccttctgagcaaaaaattgtcggaactttgcatttaactagtttagccgaagttcctgaagcaaaaccgcgccgtcctttgaatgaatgggtgaaggatttagcggatttgtaagattgatgtttcgtgtgattagcgttacaatggtacaagtgtaagaaataaggaggcgagcaagatggcagttccagctagacgtacgtccaaagcgaagaaaaacaagcgccgtacgcataaaggcttaacagcaccaggtttgagtcgcgatagtgaaacaggcgaataccgtatgtcacaccgcatctcaccagacggcacttataaaggtcgcacaattatcgaaaaataagaggatttgttccagcgattggaacaaattcttttttttgtgatactataatggaaagagctaaatacacaaaaaggagtctgattttgacatgacagaagaatttgtgaacaaagaagatgcgctgaaaaattataatgcaaaagaatttcgtacaccagatggctatacgagtgatatgattttaactacagtaaaagagttgaacgggaaaccaacattacatattttattaattaaacgaagccttacaaacgcggaaggaaaaccaaatatggaaggcggaaaatgggcagttcccggcggttttgtcgatgaaaatgagtcagctgaacaagctgctgaacgtgaactagaagaagaaacaagtttgactgatattccgttgattccgtttggtgtctttgataagcctggtcgtgatccgcgtggttggattatttcacgggcattttacgcaattgtgccaccggaagctttggaaaaacgagcggctggcgatgatgcagccgaaatcgggctttttccaatgacagaagcgctcgaattgccacttgcttttgaccatttagacatgctgaaaaaagcgtttagtgcaattacagaagaatttttactgacaacggcgattcgcgatttcttgccggaaactttctcagcagagctactttaccaaacgttggaaggctgtacgaagccagggattttaccggatgaagtagaatttatggagaatatcgagtatttaccctatttagaaaaagtgggcgatctgtacagatttaacgcagatgctgaagcgggaagtatttatttttaaatagaaaaggagccaccgatttggttggctcctttttttataggaaatgtttttcgccgtagcgtaatgcgaaatctttaaaagctttggatgcgggtgaaatgtagtggtttttcaagcttgctaagtaaatgaaacgctcatgttttggctcattgatagagagtactttgacgttataatgcgcgagagaggagatttttggcatgatagaaataccgtaatcaacactcacaaggccaaccattgcggtatcttcctctacataacagccgattttaggttgaatatttatttcagcaaaaagagaatcaattagaggtctgaggccacttgtgtcagaaaagaagatatacgaataatctgcggtatcttttaaatcgattgaatcatatttggcaagcggatggttttcagcaaccacaatcaccagttcttgtttcgttaatggcaaaaattcaatatcgggttcattttcgacgtaggaacagattgctaggtcaaatttttcattttttaaatcaggaataattgattttgtcgcgccttggtaaaaggaaaaagtgatatctttgtgattttcagctttggtgaaattttggacaagttctggaactgtgtgtgcgcccattgtgtagataaagcctaaatcaatatttccgtgcgatgggctcgttaattcgtgtaaaagtttttcgcctttttctagttcggcgagggatttttccacataagttaaataaaagcgaccgtatttagttaaacgaatattgcggccttgtttttcaaataagtagacaccaagttcgcgctcaagttctgcgatagaatggcttaagctaggctgggtaatggataattcggcagctgcaatagtgtaatgctctttttcagccagttttttaaaatagtataattgacgcaaattcatgaaactacctccttgaaatgccttgataactctattgtaagcgattatatagaaaaaatctatgaataaatcgaaaaatatacattagattaataattattcctgacttataatgaaagagaaataagattgtgcattattgaacgtgaataatgtaacaaatcatttgctgagattatagtcgcaggaggcttattatgacagattatccgagtatttttgaaccattaactgtaaaacgaatgaccattaaaaaccgtgtgataatgccaccaatggggacaaacctagctggattaaatggcgaatttttagaagaacatatgaattactacgaacaacgtgcaaaaggtggaacaggtctaatcactattgaaaacgcttgtgtagatttcccttatggtacaaatggaacaacgcaacttagaattgataatgaccaatacattcctggattttacaaattaacagaacgtcttcataaacatggaacttgtgtatccatccaaatcaaccacgccggtgcatctgcttatccagcacgtttgaatggacttcaaccagtttccgcatcagatattccatctaaaaaaggtggtactgtaccgcgcccgcttacagtagaagaaatttatgaaatcgtaaataaatatggtgatgctgcaagacgcgcccaacaagccggcttcgatgcagtcgaaatccacggcggacactcgtacttactatgccaatttttatcgccactttacaacaaacgaacagatgaatttggtggaacgcctgaaaatcgcgcgcgtatcgtcaaattaattttagaaaaagttcgcgaggaagttggtccatttttcccaatcgtgctgcgttttagtgcagatgaatttacagaaggcggcaaccacttagaagatattttggaactgctagattattgccaagaagaagcggatattttgaatgtatcagcggcaattaatgacaacctatacttgcaaattgaccaaatgaacttagaagatggttggagaagctaccttgcaaaagcggtgaaagataaatttaacaaaccaacgattacttccggtaacattcgcagtccaaaagcggcagagaaaattttgtcagaaggatatgcggacttacttgcgatgggacgtggcttaatcgctgagcctaactgggtgaacaaagtggcaactggtcaagaagacatgcttcgaaaatgtatttcttgtaatatcggttgcgcagatcaccgaatttcgaagtcgaagccaatccgttgtacggtaaatccagatattattcatgaagataaatacaaagaaacaaaagtaactcgtcctaccaatgttgtcgtaattggcggcggaacagcaggacttgaagcagcttgtacggcggccgaagttggctgtaacacaacgctaattgaagcgaatgaacaaactggtggcttggcgcgagctattgccaaccttccagataaaagtagaattgccgatttccctaattatttagcgaaccgagcagaaaaattaaccaatttaaaagttattacaggcactaaagctgatactgcgcttattgatacatttaatcctgatgtggttgtaaatgccacaggatccaaaccattacttccaccaattaaaggtttgctcgacgtgattgacaaagaaggcagtaaggttcattcgattttcggacttatttcgaatatcgatgactttaccgaatttagtaacaagaaagtcgcagttatcggcggtggtgcagttggtcttgatgtggtcgagtacttctcagaacgtggctcggatgttacaattgtagaaatgatgccaatccttggaaaggacttggatatgattacacgactttcgatgatggatattattgagaaaaaccacgtcgatgtgcaaacagaaacggcattaacagaagtagcagccgatcatttcaaagtgaagcatgacggagtagacgccgagattccatttgattacggctttgtctgcctaggaatgcgaccagaacgcccgcttatggaagaacttgcggcttatggcaaagaaaaacaaattgaaatcgtaaatattggcgatagcgcagcaacaagaaaaatcttggaaggcgttcgcgaaggaagaaatattttaactacattagaaaaaataggctctttgtaagccgaactggcaaggcggattccgttttgccagattcgctctctatataagttcatattttcacaaataaactttaacttggaaaggaacgatgttattatgacaaacaaaatcactgaaagaatcacaggacacacagaattaatcgggttaatcgccactccaatcagacacagtttatcaccaacaatgcacaacgaagcttttgcaaaactagggcttgattatgtataccttgcttttgaagttggagacaaagaactgaaagatgttgtacaagggttccgagcaatgaacttacgcggctggaatgtttctatgccaaataaaacaaatatccataaatacttagataaactttctccagcggctgaacttgtaggggcagtaaacacagttgttaatgatgacggcgtgttaactggacacatcacggacggcactggctatatgcgtgcgttaaaagaagccggtcatgatattatcggtaaaaaaatgacaatttgtggtgctggtggtgccgcaacagctatctgcatccaagctgctctcgatggcgtgaaagaaatctcgattttcaacagaaaagacgatttttatgccaatgctgaaaaaacagtagaaaaaatcaatacaaaaacaaattgtaaagcacaattatttgatatggaagaccacgaacaattacgtaaagaaatcgcagaaagtgtgattttcacgaatgcgactggcgttgggatgaaacctttcgaaggcgaaacacttctaccaagtgcagatatgcttcgtccagaattaatcgtttcggatgttgtttacaaaccaactaaaacaagattgctggaaatcgctgaagaacaaggctgtcaaacacttaatggtctaggcatgatgctttggcaaggtgcgaaagctttcgaaatttggacacacaaagaaatgccagttgattacattaaagaaatcctattttaaaaacttgcaaaagaacaaggttatcgctaatcttaagacataatatcgaatgaggagaattatacatgaataaagtagtcgtaaagaatgttacgtttggtgaaggtgcgccaaaaatttgtgtaccaatggtcggtaaaacggttgctgctcttaaagaagaagcagaaatgttaaaaacaatcgatttggacgttgtcgaatggcgcgttgacttttttgaggacgtaaaagatttagttaaagtgaaagctgcgctagatgagattcgcgcaattttgccagaaacaccgattttattcactttccgcagtgcaaaagaaggcggcgagttagctgttagtgatgaattttattttgaattaaatgaaacactagctggcactggcaaaattgatttagttgacgtggaacttttcaatgaagaagcggatgttttacgcttaatcgaaacagcccacaaaaacaatgtaaaagtagtgatgtcgaaccatgattttgataaaacacctgcgaaggaagaaattgtttctcgcttaactcgcatggaagcactcggcgcggaccttccgaaaatcgctgttatgccaaaatctgctggagacgtactaactttattagatgcaacgaataccgtatctgaaaaagctaatcaaccaatcattacgatgtcgatggcgggaactggtgtcatcagtcgtcttgctggcgaagtatttggctccgcaatgacatttggtgctgcgaaaaaagcatccgctcctggtcaaattgatgttaatgagttacgtcatgtccttgatttactgcataaacaattttaatgaagttcgaaaaaccttaaatttagattaatcgtctaagtttaaggtttttttgttataataaggcatcaggaattttaaaggagacggaactaaatgaagaagttactttttttaggtgatagtgtgacagatgctgggtgcgattttgaaaatgaccgcgaattaggacatggttatgtgaaaatgattgcagaacagcttgagaaagaagatgtaacggttataaatcgtggcgttagtgcgaaccgggtggcggatttgcatcgtcgtattgaggcggatgcaatttcacttcaaccagatgtagttacgattatgattgggataaatgatacgtggtttagttttagcagatgggaagatacttcggtgacggcgtttaaagaagtgtatcgcgtgattttgaaccgaattaaaacggagacaaatgcggaactgattttgatggagccgtttgtattaccatatccggaagatcggaaagagtggcgtggtgatttagatccaaaaattggagctgtacgcgaacttgcggcagaatttggtgcgacgcttattccgcttgatgggctaatgaacgcgctcgctatcaaacatgggccaacctttttagctgaggacggggtgcacccgaccaaagcaggacatgaagcaattgcttctacttggctagagtttacaaaataacgctttacagaaaaaattatccatgctatagttgggtctatgcgatgagcctacaagcagtgacttaagtatcactgccccattttccgcgttatagctttgtggaaggctgcggaagatgacgctatgaaatgccccttaaagtaatttaaggggcatttttctataaaaaaggagtgtttgttttgcagaaagaaaaagcaccaataggactttattttttattaattgcagtgatggcgagttggggttttaacgtaacgatgacgaaagtattagttagctattttccgacagttacgatgacatctttccggattttcacagcagcgattaccgttattattattttatttatcaccaaaaaattacgtctgcctacaaagcgggaatttggcttgattttcctcgctagtatttttaatattgttattcatcattttttcttgtcgaacgggttgaagctgacgactgggacgaatgctgggcttattcttggttctgcgccaattgtggtggcgattttttccgtggtttttctccgtgaacgaattggggcatggcgtgcgctcggctttttagcagggatttttggcgtgagtttggttgttctttctaatggaacgggaattagcgggatttcactgggagatatcgacatctttatcgcgatggcttcccaggcatttagttttattattattaaaaagctcgctggatcaatggacacgggtctgatgacgggatacatgttatttcttggttcggttatgttgtttgctttaagtcgcttcatggagccgggaggcgtgtcagaattagtggcggttcattcatggaaactgtggctcttgtttgttgtttcagctgtagttgcaacggcatttggcaatttcgtttataattatgcggttgggaaaattggaccgtcgcgctcggctatttttatgaatttcaatccattattttcgcttattggcgcattgcttttccttggcgaagctattaaaatcccacaactagtcgggtttgtttttatcattattggcgtcctgcttggttcgggcgcattaatggatcttatttatgaacgcaaaaaaacaaaagtacgcgatcctgaaaaactgctcgaaaaagaagtttgacttttattgacctttatattataatttggttagttacttattaaaagtaactcgataatgataggagggatagcatgaaattgttattaaaaaatattaatgaacttgctgcaaaacaaaaaagtgaaggattaactgcttttgaaaaagaaagacaagctgcccttcgtcaagaatatttgaagaaaattagaggaactgttcaagataatttgcatcacgtaacaatcattgatccacttggagacgatgtaactcctaaaaaactaaaagaaatccaagccgaattaagaggctgatataaatcaaaaggttgaaagagctcattgctttttcagcctttttttgttgacagagctaatttaccatcttgcggagtcaagtagagaaaaatggtgacgaacagtttaacattttcggaaatactggtgctacaatcaaaatgagaaaggagaggataacatggaaattgcaatcgcagctgaccatggtgggtttcagttaaaggaaaaagttcgcgcacatttaattgaaagcggctacaaggtgaaagattttggttgttattcattagagagcgtggattttccagagtacgccgctaaagtagggcacttcgttgcaaccgaaaatagtttaggtgtactttgttgcggaacaggaattgggatgtccatcgcagccaacaaaataaaaggcgtgcgtgctgctgtcgtttcagacacattttcagcaatgatgacgaggcgacataataacagtaatgttctttgtcttggtgaacgtgttcttggcgatagtctggcgttactcttacttgatacctggcttgcggcggaatttgaaggtggaagacatatgacaaggctcgcaaaattggcagagcttgaggaacaggaggaagtagaatgaaaatgattgcggcttccattatgtgcgcagactcgcttcatctcgctgacgaacttcgcgccctcgaacaagcaaacgtaaagatgctccattgtgatgtgatggatggtgtgtttgtaaaaaatgcagcgatgggcgcctatgtccttcaagatataaaaaataatacagatatgttgcttgatattcatttagctacagtgaatcctgataaatttgtggatttgtatgcggcgataaagccagcttatatgtccttccacgtagaagcttcacctgatgtcgatgcgactataaaccacattcgggagctaggaatcaaaccgtccatcgccatcagcccggatacagaaattgaacagatttatccatttttagagaaagtcgatatggttttaatgatgaccgttaacccaggattcgccgggcaaaaattccagcatcatgtactagaaaaaatcaaaaaacttcaaaaagagcttgaaagccacaccaataaaccattaattgaagtagatggcaacatttttgaagaaacagtccggttgcttgaaccaattggcgcagatgtctatgtcgttggaacagccgcattatttaacgacaaggcaggtagttatacagaaaaactagcgccacttagagaaattatccaagaaaggtgagggaaaatgcatttagattcagctaatttagaagacgtgaaaaaaattcaaaccagctccatttttaaaggaattacaacgaacccaaccattttattaaaagaaaaatgtaatcgagaaacagcgattaagcgtattttagaactaacagataaacaagtttttgtacagacagttggttttacctatgaggaaattttggcagatgcgcgcatgttactagctacatttgggaaagacaaaatagctattaagattccggcacatgaggctggtactaatgtgattgatacgctcaaaaaagaggataaagccattcaaatcttaggaactgctatttattcggctgatcaagcaatcgcggctgccttggctggtgcagattttgttgccccatatgtgaataggatgagcgcagcgaacatcgatccttttaaagaaattgctgggatgcgtcgtttttttgatacaaaggcacttaaaacacaaattatggcagcgagctttaaacatagcgggcaagtaatgcaagcctacgaaagtggtgcagatacggtaactattccttatgaaatttatttgcaaatgaccaataaagttttagcagtagaagcaattcgtgtctttaataaagatgctacattgtacgaaaattaacaatctccttctcatgttgtggaagtgtgtggagaaaacttgtgatgaaagcgcattcttaagcgccaaaccctatgctataattaggctatcaaaggggggagacgcatgtatctggataacagaagtaaaacactatttcaagaagtcataaaaaatccgaacattacaaataaacaactcgaagtaaagtataaattatcgcgttaccaaatcagctatagttttcagaaagtaaacgaatggctcaagtggaaaaattatccagaagtaaagcgttccaaaaacggcagatttatattagaaccagagcttacagcgctattttctgagaaagaaactcgagatccgagcgtagaatacttaccttctgaaaatgaacgtgccaatttaattttgctgatgcttttaacagcaaaagaagaactatccctcgcccattttacaacgaagattcaagtaagcaaaaacaccattcttcgtgatttaaaagtagcgcaaaaattacttcctaaagaaacaacggtcacttatagcagagcatcgggttatcagttggcaggcagtgagtgggaactgcgcaaggttctgacacaagttgttagtagcgtgaaagagatgtttcgaggagagcactatttcctatcgtattcagggattgaaaaagtccaactaatggaaattcgccgcacactcgaagaagcagaagcgatgatgcaaataaaattcacctatgaacaaatcgaattactaccctatttgctatccgtgatgttcttaagaatcagagaccggcgcttaatcgacactgcttttcatattgacgagaaatcactttcagacacgagagaataccacattaccgatattttgctcgaaaaaactggcccagttccagaacaagagcgacttttcatcacattacaacttcttacaacaaacatcttttccggcgaaatcttaactgaaaaattaacagaagacttggaaaaagttgtcctcatatgcttagatctattcgagaaaaaagcacttgtttcacttaaaaacaaacatatcttaattgaaaaattactcttacatctaaaaccagcctattaccggattaaataccaaatgaatttagaagatacactttatgaaaaattcaatcaagaattcgaggcgcttaacttcattgtgaaagaagcttttgacccacttgcgaaatttattggtcgcgaaattccggcaggtgaaatattctttatttctttgttcattggcagcgatatgattccgcaaaatgatatttatcataaacaaaaacgtgcgattgttctttgtccgagcggggttactttttcaaaaattatggaaaatattttagtaaaactattcccggaaatccatttttatccaactatatctgttcgtgaatacgcctttttcaaagcagaagtagatattgttttttcatccattccgttaaaagatggcgaaaatgtctttgttgttcaaccatttatgaacgatattgaaaaaacacaactaaggcaacaagtgctacaaaatcttttcgggatgggaaatcagctcacaaacattgataaaatcatggaagtcgtagaacgtaacgccgatataaatgatccaaatgcgatacgagatggaatcattgatattttgtcagcgaatacagctacaaatgaaaataaacgtgtgaaaaaagtctatttacatgatttaatcaccgaagataacatcatgatttgtgaggatgttaaaaactatcaagaatcgattcgtctagcgagtcagccgctgctactgcaacaagcaattacagcgaactatgtaaagaccatgattgataaccataaattccacgatccgtacattattatcggtgaagatattgccattccacacgcaatgcctaatgcaggggtaaatcgactcgctatgtctcttttagtcgtgaaaaatggtgtatatttttcagaaaccgaacaagttcatttcgtaatagtcattgcgcccgtggataaagagcaacacattgaagcactttaccaaatcgttcatttagcagagaatcaccaaattctagatgatttgctcgaaaatgtaacgaaagaaaaagtcatgcaaacaatcaaccaattagtaattagagaggatgaataaattttggataagcaagctattttagataatattcaccaaacatggcaagaagaagcaaatgcgatttcccgtttgccggaagtaacaagtgaagaggctctcgttaaaacggttgaaacaatcgccgagtgcacaggaaaaattgtcgtagctggttgtggaacatccggcgtcgctgcgaaaaaattagtacattctttcaactgtatcgaacgtccggcagtctttttaaccccatcagatgctgtacacgggactctcggtgtacttcaaaaagaagatatattgattctcatttcaaaaggtggaaatacaggcgaattacttaatttaattcctgcttgtaaaacaaaagggagtacattgattggtgtaacagaaaacccagaatctgttatcgccaacgaagcagatatctttttcccagtaagtgtaaagaaagaaccagatccttttaatatgttagcaacggcaagtacaatggctgttattgcaagctttgatgcaataattgtttgcttaatgacctatatgaattacacaaaagagcagttttcagtcatccatcctggtggtgccgttggaaacaaattattaaataaataaacaagcagccagtcggagggatgcaatttggatgtattagaatattttaaagaagaaatggttcgcttttcaaacgaacaaaataaagaaaaattacttacggaaatggctgaacagttgtgtgaagtaggcgctgtaaagccaagtttcaaagacgccgtaattaaacgggaaaaagtttttccaacgggattactaaccgctcatgctggagtcgccattccacatacagatagcgaacacgtcattcgtccagtaattgctgtgcggatacttaaggaaccagtttcttttattgaaatggcctctgataacgaagcaattgatgtgagaattgtctttatgatggcgctgaggagtgctgacgaacaactagatatgctacaaacacttatccaacttattcaagacgaggaggtgatgacgaccttacttaaagcgcaagaaacgggagatgttctctcagcaatagaacatttttctaagaataattaagggaggtcgggaatagatggggagtttttttgcaagttttgtagactggctaataggaagtccaggtagatttgtcgttaacttaattgaagataatatgttaattttcatgttcgtagtaatgatttacgccaccaccattttatacgccaagtggacactcgcatactacttaccgaaaaaaatgagtcagttagcagaaatgaaaacgtgggaactggacgaattatatgcagcgtggcaaacagagaaaaaagctctaccatggtatattcttgttccaagtcgcaatgaattttgggtgaaatctgcccgaaacgcaccagaatcaactaaattactccattttagtcagcaaaaattaaaactaagtgacaaagaaaagttacaaaaaatcatagaaattcaatcttgaggtgataatagtggcaaaaatagttccgtctgtttttggagcagacatcggcagaattaatgaacagttagaggttctagagaaaaatggcattgatttattacatgtggatatgatggatggctcattcgtcccaaacattgcttttgggcctgatcaaatcaaaatgatgaaaaaaggcacaaaacttcaatttgatgtgcatatgatggtgtatgaaccagatcgttatattccaagattagtggaagctggtgcccatatgattacagtccaccaagaagcgacaactcatttacatcgtacaattcaactaattaaaagttacggagtgcgcgctggagttgtgttaaatccaggtacaccaccaagcactctagaatacgtgttagatgatattgactgtattttgcttatgactgtaaatccaggcttaggtggccaaaaattcttccaatcaagtttagaaaaaatcagaaaaaccaaagcgtatattggaaaccgccctattcaaattgaagtagacggcggagtaaatgacgaacttgcgaaagaatgcacacttgcaggcgcggatttaatcgttgtaggatcttatttatttgaaggagatatcgaagcgaatttggagaagttatcgaaaggagttttaacagaatgaaagctttaaaattatatggaaaaagagatttgcgttatgaagacgcagatatgccaacaatcgaacaacctgatgatgttattttgaaagtaaaaacggttggaatttgcggatcagatatttcgagatacagtaaacttggtccgtatgtaccgggaatggtgtggggacacgaattttcaggagaagtgattgaggttggtagtgcggtaactgatattgaaattggtgatagggctgccggatgcccagcactctattgcggagagtgtgaatactgtaaaaaaggcgaattcgcccgctgtcggaagctaacagtaatcggagcaagacatcccggagcctatgctgagtatatcaaacttccagcagaaaatgtagtaaaaataccagacgaattagattatgaagcggctgcacttgtcgagccttctgcagtggtcgttcatggattttatcatacgaaattacaagctggcgatgatgtcgtcgttgtcggaagcggcaatatcggtttgctagcaattcaatgggcaaaagtttttggcgcaagaagagttattgcgattgatgtagacgataaaaagttagctcttgcgaaagaagtgggagcagacgtagttattaattctttaaaagaagatccattagaagtagtcgcagcacatacagatggtctaaatgctgatttagttgtagaagccgcgggatcacctattacatccgctcaagtttttgcctatgcgaaaaaaggtggaggcgtcgtgttcctaggaattccatatgctgatgtaacaatcgaacgtttctattttgaaaaaattgtgcggagtgagcttacagtttggggttcatggaacgcaatttccgcaccatttccaggaaaagagtggcaaacaaccattcacttcctagctaacaaacaaatcaacattgagccaatgattacacaccgtctttcacttgctgaaggaccagaagtttttgagcgaatctatgaaagaaatgaatttttcgggaaagtactatttttcccagaatgatagggggattttaagatgaaaaagaagagaatttatgtatgttgtgggacaggaattgcgacttccacagttatttccaaaaaagtgcgtgcggtattagatgaaaagcgcattccatatgaaattagtcaatgcacggttcaagaagtagcgtcaaaagtaagcacatctaagccagacattattgttagttcaacaacagttacaggtgatgttggtgatgtaccagttgtcattggaagatcatttttaactggccttaaaaaacaagaaacaatcgatgaaatactcgcgatacttcaagattaaagggagggcacaaaatggatattattctagatttctttaaatatattatcgggcttggtgtaacagttatgatgccaattatcattaccattctaggtgtgattttccgcaagaaaattagtgtagcttttaaagcgggattaacggttggtgttggttttgttgggctaggcgttattacttcacttatgttaacgaccattacaccagttacaaaagcactggtagagaactataattttaaattaaccgcgacggatattggttggggagttggctcgtcactcgcatgggggactgaagtagtgccatttgtttttgtagcaattattgcaactaatattttaatgattgcctttaaatggacgaaaacaatggatgtggatatttggaactactggcagccgctttttatcgcgagtgcactttacttaacgactggtagtatgattattgcgattcttagttcgattattaatatggcaattattttcaaaatcgctgactggacgcaaaaagatgtggaggatgtattaggtttggatggaatttccttaccacaaattcaaacttctgggtgggctcttgttggttatccgatgaactggttacttggaaaaattcctggcgttaggaaaatcaattggtccacagagaaagttcaaacccgtttaggtattttcggcgaaccaatgctgatgggcttaattatcggtggtggacttgcagcaattgcgcaaatgccactaagccaagtattgcaaactggagtaacaattgcagctagtttagtacttattccgcggatggtttcgcttttaatggacggtcttacagttatttcagaagctgcccatgaattcatggaaaaacgttttccaggtcgcgaactattcatcggactagattcagcggttgggattggacacccatttgtactttcacttggactgttaatgattccaattactttaatcttagcgttcattttaccaggcaataaagttttacctttagctgatttaacggcattaccattctatatgatttttgccattgttccttcaaaaggtaatttgtttagagggattttcacaggtattgttatcgtcattattaccctctacctatcaggcgcagcggcaccactgatgacggaacttgctggtcaaatcggctataatataccaaaagatgctgtagaagtaacttcactagctgtagggactcagtggtatacttggattgtatattacggacttcattggttcggcggcattctttaattgcaatatagtgaaacaagcattagttcacgctaatgcttgttttatttccgggaagaatttttagctagtagacaaccctcagacagttctatataataataaggagaagaaattagtacggcggaaggagatagcaatgacaggcaaaatgaaacttttttctgtgacgagtgagagaccacttgcgacaaaaattgcagattatctagatatacctttatgtgaggtggagctccagaagttcagtgatggagaagtgaaaattaatattgaggaaagtatccgcggaacgaatgcgtatgttgttcaatcaatgaatgcaaacgtaaatgaacgtttaatggaacttttaatcatggtagatgccttaaaacgcgcttccgtgcactcaattaatataattatgccttattatggctatgctcgtcaggacagaaaagcacgctcaagagaacctattactgccaaattaatggcaaacctaatccaacgtgcgggagcaaatcgtttaattacagttgatttgcatgcagctcaaattcaaggctttttcaatattccaatcgatcatctttcagcagttccacttatcggtgattatttgattgaaaaatacggtgaagaggacgtcgttgtagtcgcaccagatcatagtggtgttgttcgtgcacgtagaattgctgatcgattaaatgcgccaatcgccattttaaatcgtaaaccaagaccgcacgaagatgagattatgagcgttatcggcgacgtgaaaggcaaagtcgcaatcgttgtcgatgatattatcgataccggtgtacgtgccacaacttcagctgacattttacttgaaaaaggggcagtagaagtaatcgcgtgcgcaacccattcagtcatggctggagacgcgactgaacgcttgcaaaactcaagaatcaaagaagttattacatcggactccatcgaccttccagaagaaaaacaattcgaaaaactaaccacgatttccattggacgaatcttaggccgcgcaatcgaaggcgtccaagaaaaccgttcattgcatccgttattttaaatattaaactcaaaaacagtaacttagcatagtgctgtttttttgtttttagtaaactgtcgaccagcagtagcgtaaaaattccgaagaccgacaggaagttgtgaatgcttggaggaagcagagtttggagatatttgctttgaaaaagtatactggtaaaagtagattttatctgatttggaacaggtcgacagaaacagccttttgaggtaagatgggagtaagaagaaaatcgcacgggttttagttacttattgtgaaatgtaaattttatatttgttagttgaactagttatttaaaccagttttagttactcactatgaaataaaagcccaatatataatcgttgctcacatttaaaaattacagttttaaattaactccctaaaaaatgcctttaacaaccattgacatttaccaactctctcaaaaactcaaacataatctggaggacatcaacatgaaaaaagttctaatgccacttatgcttctcgcagttttattctatgggtgtacatcacaaaacgaaggagtaacgaaagaaactgccatttcgaagacgtttattatacgggcggactacgctattccagcaaatttggatgaactagtagcgaacagtgattcgattgttaaagtgaaatttctacagaataaagacatcggtaaaaatggaaatacgattagtgaagtagagattttgaaaaactataaaggtaattttaaaaaaggcgaaaaagtagatatttcggaaccgtggtatttaagtaatgataaatatgtcgcggttgaaaactatattgcacttgaaaaaaatgaagaatataccttgtttctaaacgagggtgacgataaagtaagttctatagttagcatgggttatggtaaattcagtgaaaagctccaagaaaaacaaggcgttctggcagattttgacaaacttggcgaagttcaaaaatacgattttatttccgaaagtaaggatgaagtaaagaattaccaagcaatcaaacaacaagttttcgaaaaatatcaagattcaaagtaaaaaaggcaaatggtttagcctagttgcggaaaacttaaaattccgtcataatagaaaaaaatgacgggagctgataaattgattattgatgtattgcaacatgtgccgcacgaaggacctggacttatagcgaattgggcgagagaaaatcagcatcagttaaagatacatacgttatttgaagaaaatgaacatgttccaaaagactcggattttttaattgtgcttgggggaccgatgggaataaatgatacagctgaatttccgtggttaaaagacgaacgtaagctaataaagcgattaagtgaacagcataaacccgtttttggtgtctgtctcggagcacaacaaatcgcagcaacattcggaagcgaaatcactgtaaataaagtaaaagaagtaggctggtttcctgtcaaaagaacttccgataaattatcattttttccagaatcattaaatgtgtttcactggcaccaagatacgtttgcgttaccagctggcgccacgcgtttatttgctagtgagggttgtttgaaccaagcttttttgtacggtgaaaatattatcggtttacagtttcattttgaaatggaaaaagcggggattgagacgattttgcaaattgatgaggcgtttatcacacctggaaaatatgttcaaagcgtggaagtgatgcgagagaaggatgttccagaagataataaacaaatgcttgaggctattttagattatttaataaatccaaaaaccatctgacgagaaagtcagatggttttttctttaatatccagtttcaacagaagcattgacaatatacattaagtcgttcttgtcttctttatcttccaagaaaatgccgcttgttgtcatcatgccgccagccattttttcgattgttaccgtaccataagggataattgcgcgaatagtatcttcgtctaatttatcagcatcgcatggtaaagctagtttgatattcactaccatgttttgtaaatcgccctctggaaggagtccctgaatcccgggcatcgaattagtgaaaatcgcatttcttacagcgcgttcagccgctttagttatattttggccgtgtacatctacaccaaagccagtttgaatgaataaaatttgttccataattgtcactccttaaagtcttttattaaagctgcaccaggtcgattttttgcgtagccttccatcacttcggtaaaatgtaagccatcagtatcagaggaattagcgaatatttctgccatctgttttcgctgtgcagcaccgagttcgttttctaattctttacccgctgtggtcaagaaaatacagcgttggcgtttgtcgcgagtgccttgttcaattgtaagaagttcgcgatcttttaactctgcaagtggctggtgtaaggcttgtttcgatatttctaaaaaggttaaaagttcgttaatcgtaagtccaggcatccgtgcagtaaagaacaaaatgcgatgatgtaatctttttagtgaatgtttggcaataattaaatcagcggtctctgtaaatgctttatagccgaagtaaaataaagcgatttgttgattcatgttttgctcattgttcataaatatacccctttttctgtcaatatcaacagtatagcataaatagggcgaaggaatgatggtaagcgcactacttttttccaataaaaaagcttgttttttaagctgaatttgataaatttttaaataaattggaaacagaaagtgtaatattagtatttgtgaacgcatatttgtgtacaaaatgttacgttaatagaattttcaatctttttatttttgagaaataaaacgctttctttattgatttaaagcgatttgtcaatattataaactgaataatatgaatattaaagcaaatcaaacgtgaaatattttacgaaaacgtattgagagttaatttttatgacgttatactttggaaagaaatcaaccattaaggagattataaatgaaaaaagttctaaaattgtttctcgtaactatttgtatgtttataatgatctatcctacaacggcagttcatgcagatgaaacatcagatgtcgttaatattcctgatacaaacttaagagcatatctgaatggactactcaaacaaacgacgaatgctccaatcactaaaagccaactagcaacaatcaaaaccgttactctttctggaagtaattatactgatcttaccggtatagaagaagcggaaaatcttacaacactgacacttaacaatacaaacattcaaaccctagagccaattaaaaaccaaacatctttgacttacataacggttagtggtgacaatgtgaaagatagcctttttgtagatttaaacgggctagttaatttacagagcttaagtatcagtggcagcgaagtaacacataatgtttttaacaattttaataaattaccgaaactaacctatctgtacgcacaaaattcaatgaaaatcacggatatttctgcattagcctctttgccagcattaacaacgctttttgtgcaatttgatggaattgatgattttcgtcctttaaataattttgagagttttaaaaatggtaacttaaaagctttagcagcatttggacaaaataccgggcggacaaatccgcgcatcacgcttaaatcaggcaaacttgattttaacgaagcaaaccaaacgttatatttaccattttcgatgatgccaaagccattaactagctttgatgggacagttgctcctttttctaagtcaacctctgcaagtaacacgtatttaggttttaacgatgtggcacttccaagttcacgtcttacaattacagatgatggcattacagtaagtggcgtaacgaaagaagaatttgataaccttgacgaaattgaatataatgcacgttatgactttccaactggcagctatccgacaccaccaagcatgacttcatatacaatctccagcggaacatacgatcagtattttgatattagccacactttagatttaacagctgatgaaagttttgactataatcaatacgatgcaacaaccgaagagcaatttttaaaagatgttcatgctaaaacggacgatggcactcttgtccaaagtgactttaaccaagtcgtaaaactagatgtaccgggcgaatacacggtcacattaaacgcagaaaatgctgccgggctaaaagcaactcctgtgacagtaaaagtaactgtacatgaaaaacctgttatcacagcagatcctactatttcttataacaaagcaacaactaaatcagtcgacgaatttttaaccgagattcattcagctgtaacaggaaacgcgacacttacaagcgattttaataaagtagtagatttaaccacaccaggaaaatacaccgtaacattaaatgctgaaaatgagcgcggccaaaaagcagatcctgtaacagttattgtgacagtcactgatgcggacggcgaaacagttgacccaacaccacctacacctgaagaaaagacccctacacccgaagaaaaaccctcaacgcaaaatgaaaaatcaccttcagaacctacaaaaaacccagacatacaaagtgaaaacacagaagaacaagttactgtgcaagaaaaagcaaataatactacattaacaactaatgaaaatgtaagaacaaaaacaaaccagccaaaaactaaagcacttccaaaaaccggagatgctggattcggcactcttccgttagtttcagcaggagcaatgcttagtttgacggcactcgttcttttcagaaaacgcaaatcttaaacatctgaaatgaagcctaaaattatttttatagggtattgaatactataagaaaagttgtaggaggttataattatggaaaaatatcatcgtattcttgtagctgtagatggctcggaaccagcgaagttagcctttgaaaaaggattagaattagctctgaaattagatggtgttcttggtattgcaagtattgttgatttacgagctttttctccaaatgtttcttatgatggaagtttagaagaaaaagcggaattagaactaaaaacgagcgtaaatgaatatgccgacattgcaaggagagctggagtggcgaaagtagaaacttttgtagctaaaggaaatcctaaaatcttactatcgactgatattcccgcagaatttcaagcagatttaattatttgtggagctaccggaatgaaccgggttgaaaaacttgtgcttggtagcgtatcttcttatattatggcccatgcgatttgtgacactttaatagcaagataagaaaagagtagatactttcatctagaaggtatctactctttttgttttatcaaaacggatcaaagtacgtatattccgttactccacctggaacgggtttactgatacgagttagttcattaactattttcttagcatcttcaccaaatactggaagaggctgatagttgttttctgttgtgctaccatcggaattttcgtaagtaggaacaatagaaatattttttaaaacaattttattagcttcttttgtaaaacgcaattggaacatcgaggtcatccttgaaaggagagttgggtccgcgccaaaagcaaaatcgcccatactgtatacaatatatttatctttatatttttcgatactttccaggcggtggggatgagctcccataattatatcagcaccagcatctaaaatagcatgtccaaattgagtttggtagtttgttggagtttcacgatattcgacgccccagtgcatattaacaataacgagcgtatcttcttttttatattttttaacgtcttttacaattctttcaagataggctggagactgctgactcattcgacaatcgtaaccaagcatcacagttttcattcctttaatcgttgtttcaagcggtgcatcggaattaaaaacaggaatattattatctttgaaagcttttaaagtatcatcatagccaacttgaaagtagtctttagtatgattatttgcaagattcgctgcgtccacgccactcgctggtaaaaaggctacatgggctggatcgcttttaatgcgccactttttattttcagctttcgtagcatttgtaaaagcactttcggcattaattactgtaaagtcatcagatttaaaccaaggaagacaatttttaaaaacatacgtattagtaccattattttttttgaatacattatcaaattttaggttttctggtgtttctggataggtgccaaatgaattatcaccaaccattgttaacgtaacgacaccgttttcttttaatccttgctcgttagctgctgctgctgcataaaaccaatcatattggcttgttttttctatttcagttgatttttgttcgcttaaaagaaagttaggatatacttttccaagcgctttttcatcagctttcccagtgctatatgattttacggcttctaagcatgcttgcaagtttttgatatagtcactagattcatttttttcggtagaatagttgttcagctctttaattaattgattcaactcagaaagggaagctttgtcggctcctgaatttgctagggaacttaaggttttcttcgtttttgctgagattgttttgagattagcagggcttatttttttttgagtggtggtttgggtattattttgttcgggtttgtgggtggaatgagtaatccaaaaaactcctgctatcaagataaatgcaaaaccaatgataataaaagtaagtgtcttcaactagatgccctccatggtttcattttcactgagtacatgattttgtttaaagtaaaagcccaaaataatttgggcttttacggtgatttttatttagaacctttttctacatagcttaaatcatttacatcgccaatagtgaatttaccatctttgtaagtgatttttgtaacacttgcatttttaattccagctggtggaagtttatatccaggttcaattgtatcaagaagcgcaccaatacttaagccgtgggaaactagtaatacattgctgtctccatttttgctttctttcttagcaacttctgttaaaccatcttttagacgagcttggatagttgcgtaatcttctgcaggccagttttcgccttcttttacgcgagttttatcaagagcagctacactatccgcaaatccttttggagagataccagctttttgccattcttctaaagttttaccttggcttttcgcaatatcagtccacatattttcatttaaatcgccttcataagaaccaaaattaaattcgcggaaacgttcatctgtttctacttttttatccgcagatttagcactttctttcaaaattaagtttgcagtttggatggcacgaccgctatcactactatatgcagcagagaagtcaacgtctttcaagcctttaccagcactttttacaacgtcttccccagctggagtaagaactgcatctgaccaaccttgtacacggtcagttgtatttaacattgttttaccgtgacgtacaacataaaaagtcacagtaccatcttttttagtttctttggatgctttgtctgcgtttgagttatttccacaacccgcaattagtagtaatgcacaaaacaccatcattaatttcaaaatatttttcttcatcttattctcctttttgttagtatttagcaaaataaaaacctagataaatcgaaaaatagcccaaaaagccaattctccatttatctaggttatgcccaagttggtaacattcctgaataaggatatttatttatagctcgattttagcatgaacggaaagcgtttacaagtctgtttttaataaattttaaaaaataaatgaaactctgggggataaagtggcttaaatgctagtggtttaacgtgttaattagttggaaaatttactgtattttacattttaaagatgtctgaagtattacttttgatgctttatttagtacggtttgcgttgtgtttatttgctaaaggtattaagaattaactatcatgagacataaaaaaagaccaggatacaaatcccagtcttttcaaaactcttctaaaccaacaaaaccacaaccaacgccaaaaccgccggcaagccctgtttcaccaaaattcccttagaagaagtcgccccgccaaacagcgccgccacaacgacacaactcaaaaagaaaatctgcacagtttccgcaaatcctgctcccgcgaaaaacaatccccacacaagtcctgccgcaagaaagccattataaagcccttgattcgcaaatagtgtctgtactttcttattcgcaagtagttccttctccacgccaaacgtcttggctgcgaggttggtattggcgaaaaacatttctaaaatcattatataaatatgctcgatcattacgatgaaggttaaaataaatgctaaaatggccataaataatccctcttttctactccgaagtatagcatagcttgtaaatttttcgtaaaaataaagcttgaaacgttgacttattggcaaaatctccgtaatatcaaacgtagactacttatttttggtctgagaagggggaaattatatgcagcaagaagcaacaggtgggcagaagattcgcccaataccaattattgcctcatttttgatggctggttttattggactattcagtgaaactgctcttaatatggcgcttagtgatttgatacaggtgtttgatattagttcagcgacagtgcagtggcttacgacaggttatttgctaacgcttggaatattagtgccgatttcgggattgcttttacaatggtttacaacacgaggattattttttacagcagtgagtttttcgattgcaggtacgctgatcgcggcgctttcgccaacgtttgcgatgttaatgattggacgcgtagtgcaagcagtaggtacggcgctattactaccgttaatgtttaacacgattttactgattttcccagagcataaacgtggctcggcaatggggatgatcgggctggtaattatgtttgcaccagcagttggtccgacaatctcaggacttattttagaaaacttaacttggaactggattttctggatttccttgccattccttattattgcattattattcggaatgaaatttatgcaaaatgtttcggttgttacgaagccgaaaattgatattttatcgattattctttcgacgctaggttttggtggagtcgtatttgcctttagtagcgcgggagaaaatggttggggaagcgcgacggtattagtttcaattatcgttggtgggattgcgcttggactctttgtttggcgccaactaacaatggaaaaacctttgatggacttgaaagtatttaaatacccaatgttcacattaggacttattttagtatttatcagctttatgatgattctttcgacgatgattttactaccgctttacttgcaaaatagtttagcactcgcggcattttcggcgggattagtattacttccgggtggggtgttgaatggtttaatgtcaccatttactgggcgtttgttcgatgcatacggtccacgcgcacttgttatcccagggtttatcgtagcggttattgcactatttttcttaacgagaatagaagttggaacatctgcattaactatcatcgtgcttcattcggtattaatgattgggatttcgatggtcatgatgccggcacaaacaaacggattaaaccaattgccgccaaaattatatcctgatggcacggcgattatgaacacgttgcaacaagtttccggcgcgattggaactgctgttgcgattacgatcatgtcagctggacaaaaagcttatatggaaacagcgcaaggagtaggaccagagcaaatgattgcttcacttacagcgggaattcaaaatgcctttgtctttggactgattatggcttgtattggtcttctgtgctcgttatttattcgtaaagctaaataataaagtgaagagaacttctcgtaatgagaggttctttttttgttttgacaaataggttctgagtggttaaaatgatagtaaatatagtttataaagtttatttaataactttacggatggagcggttgatgatggcaattcctcgtgatttaaaagaattgaataaaaaaaatatcaagtcgattttacggcaacaaggtgcgatgacgaaagcggaaatcgccgaagtgactaggcttagtgtagttacagtgaataagttgattcgtgatttagtggaaaatgaagagattttagaacaagataattcagttgcgactggcggaagaagagccgtttcgtataaaattaatcctaattttcagcaggtgttagttattagtttgcaagaaaagtggaagaaaattacttattctttttcggtctataatttgcttggtgagccggagtttgtggaggatatgtctggagaggatttggacattactgcgctgaaacggaatacgaaagatcttgtttgcgcttttccgaagatttcttgtgtcgtaattggggtgccgggaattgagattggcggtaagctgcgcgcgatggattttccgctacttttaaatgtgcaactacgggagactttggaagcggaagtgaatttgccggtgttggttgagacggatacgaatgcggcaattttagggtataaaaatcggccggtgaaagaggagaatatcgttgggctttattatccggagcgttttccacctggtgcggggcttttgatgaacggcgagattttgaaagggcagaatgggctcgctggggagattaagcatatgccgttacaggtggactgggataattttgacttttcggtcgatgaaattaaagcgcatattcgtaaaatggtgctcctcacgatgagtttttacgatccggaaacgattgtgctctatacaaatttttattttgggcagaaggattttaccgaggaactgacggaagagttgaagcaagtttatccgtatgcgactttgccgaaaattgtgttgtcgcgtaagtttacgacagattatcggattgggcttttggcatttgggattgattatttggagaataatatgacggattggcggatataactttggaaagaaaatgctctagatttttagagcattttctttattattcaacaaataattttaagtctatgaagaaaagagtaataaaatatagttaagtagctgaattgatataatttttaaacaataactttaatacgtgatataatgacaagtgtaaatgcaatacttacactgaaaaacagcataagctaaattttttatgggaactatgaagtatgatatagagagaattacagtaatagttcataacaaaattgcgaaaggacgtatttatgtggcagaagcaaaatttgaagcagctttaattaaaaagcttgaaactgaagggtggacttatcgggaagatttatccaatgttagtattaaaaaacttgaagagcattggcgtgatatcttaaatgaaactaacgcacataaactcaatggagtaccattgtcagaaattgagtttggattaatccttcaagaattacaacgtattagaacaccgtatgatgctcaattattattagtgggtgcaggtggagtaggttcaattcctattactcgtgatgatggttcaagcttggaagttgaaattttttatgaagatgatgtagcgggggggcgctctcggtatgaaattgtcaatcaagtaagatttgataatctatctgaaggattaacaacaaaacgtataattgatgtagctttacttattaatggaattccggtagtacatattgaagaaaaagatgagcatttgcaaaatcagtggcgagcttttgaacaactcaaaggttatcatggtgacggactgtataaaggattgtttgcttttgtacaagttcaagttatcatgagtcaacattcggcacattattttgctcgtccaaatgcatttgaacaatataataaaacttttgtgtttggctggcgggacgaaaataataaagatattacggatgcatttgaatttattcatcaagtaatgagtatccctgctctccaccgcttagttacagttaatatgatcccggatgcgtcaaatgataacataatggtaatgcgcagctaccaaattcaagcaacaagggaaattttacaacgcatgaaagaaatggaagcaagcggacttgtgcaaaaagagggcgggtatatatggcatacaactggatcaggcaagacagttacttcctttaaagttgcacaactcttagcatctgcgcctagaattaaaaatgtactatttattgtggatcgtattgacttaatagatcaaacactcgaaaattttaaaagtttcgcatatgctcactttaaaaatcgcattaagaaggttaatggaagagagttaaagagagaattaaagagaaaaggctcctcgcaaattttattgatttcagttcaaggattgacaaaagctgttaaaaaaggtttagaaaatgacgactggaatgtcattattatggatgaggcgcaccgaagcgcgagtggagaatctgtaaagttaatcaaaaaggccctcaagaagacaacttggtttgggttcacgggtactccgaacttttacagtgatgaaataaatgatgtcaaaacaactcgagaaatttcaacgcatgatatatttggcaaacgactacatacatataccattaaagatgctattggcgacggaaatgtcttaggatttgatgtaacttatttcaaacctcattgggtggttgaacatccacaagaagacttttctgaaaaagactatgaaaaagaagtttatcaaagtgatgtctatcgtcaagaagtcgtaaaagatatccttgataactggacgaaaacatctagtggggctttaattgcaggtaaacgtgaagagaatgccttccaagcgatgtttgcagtgtcaggtaagcaagcagctgtgaattattataatattttcaaatcgaaaggatctcatttaaatgtagcaatgacattttcacgtgatgagtctaatgaacatggtacaaaggaacaaaatgaggcgcttaaaattgcgattaaagactatactgaaaaattcaatgttccaagcattttagacgcaaaggatccggctcgagcttacatgttagatataactaagcgattagcacgtaaaagaccatataatcaaggtaaagaaaaagatagattagatttagtaattgtttcagatcagcttttaacgggctttgattcaaagttcatcaacgtaatctacatggacaaaatgctcaaagaaggaatgctaatacaggcgatttctagaacgaatcgaacttttgaccttaacagcaaaccacatgggaaagtacgtttttatcgccaaggtgatgaaatgcgcgaatttgttgaaaatgcgctacgtatttatacgagaggtggcaatgatactcttcaagaagcggaagaggagacaaaaaatcagctacctaaagatttagaaaatgacgatattcttgcaaagccccagagtcatcaaatcaacgaactagaagaagctgtcttaagattgaaagagcttgctggcgatgattttagtcaagttccacgaggccaaaatgatctaaaagaatttgttggtcttgctttaactactcaaaccaggatccagcaattaatacagcagggttacgagctaggaagcgagattgaggagctaaatgaacaaggtgaagcgactggaagaatggttcgtttgaacatttcaagtattgatgaatttggtgctttacaagctcgtttatatgatgctaaggagaaattacctcctgaggaacgtccagatctcactgaaataaagattggaattgaattttatcatcacgagataattgactacgatatgctagttgagcttctgaatacctttatggatgaaaaaaataaaagtaataaagatgctatcgaaaaacacatcgtaccaatggatgaagaaagtcaacatgaaatccatgggatcgtggatgatattgaagcaggtaatattacagaacattttacaaccgattctcttcaggaaacacgtaagaaataccgtactgaacatcgagagcttaaagttcgccgttgggcagctaaccaaaaagtcaatggtaatcgtattgtggaagctttcgacttattcttaccagggcatacgctcattgataatccaaagctagcggatattgtgcgtgagattgaagaagaggaaaacatcggattttttgaagcctcagattttgaagaagagctaatggcattcttcaattcactataagcaaatatgagttttatttataataatagaaagaaggaaagaacataatggcattatcaactgaacaaaaaacaaaaatgtgggcaatgctcaaccaaacacgcggtcaaattggtttaactgcatataaagactatatcttcggaattttgttttataaatacttatctgaaaaagcaacacattggctaaatggcgtattacgcggggaaaattgggagaatgtttattctcaagattccgtaaaagccttaaattatatgaaaaagaatcttggttatgcgattcaaccaaatgaattctttgtagactggaaaaaagcaattgatacggaccgtttcaatattgggatgatgacagatacatttacgcattttaatcaacaaattgcatttgaagcgaaaaatgattttgaaggaatttttgatggtatgcgctttgatagtgcggatttaggtgctaatgcacaagctagggctagtgtcatgatttctatgattgaattgctatcctctccagaatttgatttatctggtagtaatgacacagtttcagatatttatgagtatctagttgcacaatttgctactgtcctagcatctgatatgggacaatactatacaccaaaagaaatatctaatgtaatggctcggattttaacttttggccgagaagatatggaaaaattttctatctttgatcctactgttggttctggttcacttttacttacaacagcaagttatatgaagaactcaggtagacgcggagtgataaagtattatggtcaagaaaaagatgcaacgccttaccgcttatcaagaatgaatttgatgatgcatggtattgaatataatgatattaatattaatcatgcggatacacttgaaagcgattggccagatggggtagtggatggaaaagatactcctcgaatgtttgatgcggtaatggcgaatcctccttattcagcacattggaataataaagatcgtgaagatgatccaagatggcgggaatacggtgtttcgcctaagacaaaagctgattatgcctttttattacactgtttgtatcatttagaagataatggacgcatggcgattattttaccacatggtgtattattccgcggagcttctgaggggcggatccgaaaggctttaattgataagcaccagattgaggcaataattggttttcctgataagttattcttaaatacatcgattccagtctgtgttgttattttaagaaagaatcgtattgaatcagacattttatttgttgatgcgagtaaaggatttgagaaaattaaaaagcaaaataatttacgttctgaagatgtggaaaagattgttgatacagtaattaaccgtaaagagatagagaaatactcacatgtagcaactttggatgaaataaaagaaaatgattataatttaaatattcctcgatatgtagatacttttgaagaagaggaggctattgatttggtggcacttggtaatgaaatggttacattaaatgccgatataaaaaaagccgagactgattttcttggtttattagatgaattagccgttactccggatacgaaggaaataattgaagctactaaggcggtatttcgatgaaaaaattagaaaaaagcgtgccagtaatccggtttaaaggcttttctgaagcttgggaacagcgtaagttgagggatattgctaattatcgaaatggaaaagctcacgaacaagttgaagatgaagatgggaaatatacaattatcaattcaaaatttatttcaactaatggaaaagttcaacgatatacaaatgaacaagttgaaccaatctttgatggagagattgccatggtgttaagtgacttgccaaatggtaaagcactggcaaaactctttcttgtgaaagaagatggtaaatatactttaaatcaacgaattgctggtattactccaaatgaaaatattgatccaatatttttgaatttcagaatgaatcgaaataattattttctaaaattcgatagtggtgttactcaaacaaatctatcaaaatcacaagttgaaaattttattgctttatatccaacttttgatgagcaatacaagattggtctattttttactcagttagatgacactatcgctcttcatcagcgtaagttagatactttaaagctgatgaagaaaggactcttacagcaaatgttcccaaaacgtggggagaatattcctaagattcggtttgatgattttgatgatatttgggaacagcgtatactcggagaatttctcaaagaaagtaagattaaaggttcaaatggtagtcttgcgaagaaattgaccgtaaaactttggcgaaaaggagtagttcctaaagaagagatttatacaggcagttctgctactcagtactatattcgaaaaacgggacaattcatatatggaaagttagactttttgaatcaagcatttggtattataccacttgagttggatggctatgaatcaactcttgattctccagcatttgatattgaagaaagcataaatgaaacatttttattagagtacgtatcattggcacgcttttacaaatatcaaggaaatattgctaatggttctagaagagcaaagagaattcatactgatactttttttgaaatgcctattcctttgcccaatagtaatgaacaacaaaaaattggaactttttcccgacaaattgacgacttaattgcccttcagcaaaataaacttgagaaactctcttctctaaaaagattctatctaaagaacatgtttatataattcaatatttacacttatatcaactcctaagataataaacaaaggtgattaattcatctattattatcttaggaggttttttatgaaagcgagaaagagaaaagaacaaacatttcatgagtattttaaagaatgggtagatctttataaagttggagcaatacgttcaattaccctgcagaaatactatgtaacagaacaaaaaattcaagaacttgtaccagatttaaaaataaaggatctagatcgttatacttatcaacaactgctaaatagttatgcagttactcatgagaaacaaactaccatggatttccatcatcatctgaaaggggctattttagatgctgtagatgaaggtgtgatcagtcaaaatcccacaaggaaaattgtgattaaaggaaaaacacctcgacctaaaaaagcaaaatttttaaatcaatttgaagtacaagccttattaaaagaattaaatttaaaggaggatataaattgggattggtttattctattaatcattaaaactgggcttcgattttcagaagcattagctctaaccccttcagacttcgatttttccaaacaaaaaattattattaacaaaacctgggattacaaaatggttactggttcttttcagccgacaaaaaacgaatcttccaatagaaagattcaaattgattggcaattagcaatgcaattttcccagttaattaaaatgaaagatccagataaaccgatttttgttaaaagcagagtattcaattctacaattaataatcgtttaaaggtgttgtgtgaaaacgcaaatataccaactatcacagttcatagtttacgacatacccatgcttctttactgttatttgctggagtttcaattgcaagcgttgcgaataggttagggcattcaagtatgactactactcaggaaacataccttcatattattcaggaattggaaaatcaagataatgataaaattatacgccatttatcaatgttaatgtgataataaatccccacttagctttatcttagctaggtggggattattttatataaacatattttgtagataagctttttttaattctttaattctacctagtttattttgaagaagattaatagtaatatctattttattcagaaattcagctattttcttttgctcctctattgatggtactgatattaaaatatcctcaagatacgaataataaagattggatacatttccaccttcaactctttttgcaaattcgtacttcattttacttctaaaatagtatgcaataaacaaaggatattgctctgtattataaaccgatatcatttcgccgatagcaacattggaaatcgaaagccagctacagttggcaaaatccaagggattttcaccaactcgtggaactagcacttcatttccagaactaaattttaagttgcttttatcaatatttgtataggagtgtacaatgtcaatttccggtccaaactttgtatacaattccccataccttacacatggtgtagttgcatcttgagccacagaccatttcggagcactctttccataatagaaataaccatattctcctatcttacgctgttcccattcttcgtaaaaactagtaaatcggatcttaggcttcttcctattattctctgggaatatttgttgcgagaatgctttcttcatcagctttaaagcatctaacttacgctgatgaagagcgatagtgtcatctaactgagtaaaaaatagaccaatcttgtattgctcatcaaaagttggatataaagcaataaaattttcaacttgtgattttgatagatttgtttgagtaacaccactatcgaattttagaaaataattatttcgattcattctgaaattcaaaaatattggatcaatattttcatttggagtaataccagcaattcgttgatttaaagtatatttaccatcttctttcacaagaaagagttttgccagtgctttaccatttggcaagtcacttaacaccatggcaatctctccatcaaagattggttcaacttgttcatttgtatatcgttgaacttttccattagttgaaataaattttgaattgataattgtatatttcccatcttcatcttcaacttgttcgtgagcttttccatttcgataattagcaatatccctcaacttacgctgttcccaagctcgaaatggtaagttaaagtagtgataaaatacataaaaaagaggcaacacaagctgcctctttcaaaaaaatatattacttaaaaatatctgtatctacattccacttatttaaagaaattcggtaaatactctttatgcgcttctaacatttcgtccagcatttcgcgggctacagattcgcttggagttagtgggttgattgtcattgcaaggagtgctttgtcgtaatcaccagtaactgctgcttcggctgttaggcgctcgaaagttttgatttcttggatgatgccgttgatagcgattggaaggcgtccgcttgctagtggaattgggccttggcgagtgataacacagtttgtttctactgcggaatcagggtcaatatcaaggatggcaccattgttacgagtattaacgatttgaatgtcgcgtttgtcgttatagatagagttaattaggttacatgctgcttcactgtagtaagcgccgccgcgttgttctaattgttttggtttttcagcaagttcttcttgtttgtaaagctcgaaaagttccgcttctacttttttaacaacttctgcacgagtaccatgttctgcgtatgcgcgagcttggtcttccagttgttgttttgtttgccagtagtagcgcaagtagtcgattggaatcatattaagtgtacgtaagaacgttttgtcccaaccagttgcattgatatttttaaggcttgagccagcttcatcttctgtcattttgaaaacaacatcttttgttacgtctttgccattatggtaaacagttttcgcgaataccatgtggtttagaccaacgaattctacgtaaatttcagaaacgtctacgcctagagtttcagcgatgttacgttcgatgccgatagggccgttacataagccgacaactttcttttggttactgtaacgaagaacggcttctgttaccattcctgcagggttagcaaagttgattaaccaagcatctgggcaaaggcgttccatatctttacaaatatctaaaataactgggattgtgcgaagtcctttgaacatgccgcctggtccgtttgtttcttgaccaactacgccatatgaattcgggatgcgctcatctttcacacgtgcgtctaataaacctacacgtaattgtgttgttacgaaatctgcgtcttttaaagcttcttcacggtctaatgttaaatgtacttccatgtcaacgccagctttttctaccatacgttttgctaaattaccaacgatttctaatttttcacggccagcttctacgtctactaaccatagttcgcgaactggtaattcgtcttgacgtttaataaatccttcgattagttcgggtgtataacttgatccgccaccaatagtcgcgattttaatacctttagtcattatttatacctccaaggatatttttttgaaaaggcttacttaattgttagttgccttttcttctcacagttatagtataggaattttatgaaaaaatagctagtatttgacgagctttaggtaaggattttctaagtaggaacttgtcacatttgagtaacgaggtgttacatggtaaaataaagcgaaaagaggtgcggaaatgctttttttggataaaaatttggaattaaatgatacagaattagatatttataattatatagtggcaaatttagagaaagttgtttatatgcgaattcgcgatttggcgacggaagcgcatgtgagtacgacgacgattctgcgtttttgccggaaatttggttgtaatggtttttcggagtttcgggtgaaattacagctttatttggaagagcagaagttggcgcaaattgatatggcggatgaaacgacttatattgattttctgaaacggacggcgcaacctgagtttaaagcgcaaattcaaaacgcagtggaaattcttcgcgaccgtgaactggttctatttgctggggtgggttcatcgggcgtaatcgctgaatatggcgcgatttatttttcgtcattattcacgttggcgctacatattgaagatccgcttaaccacccgttttaccatttatcgagcaaattatccgataaaatctgcatgattgcgatttcggtggaaggggaaaatgaagacatcatcagatatattcaccaattgaaggcgcaaaattgtaaagtgatttcgattacaaatagcgcgaaatcgaccatcgcgaggctatctgatgcgaacatcgcttattatattaataaggaaatgtatcaggaagcaaatatcacgtcccaactaccggcgctctatacaattgaaaatattgcccgggaaataagaacccaaattgataaagagaaaatgtaaaaagctacgttttgcttggatttccgagcaaaactttttttgtaacaaaattgtcacttacgaagaattttttattttgctacgatagttctttggaggtgaaattatgtacagtaatatgaaagagaaggtcgtttttacacttattatgtgttctttaatgattttatgcatgagctcttataatatctttcttgaaaatggtattggcgcggattcttttatgattattctaaaagcgtttgttccgtttctttttattggatttttattagacttttttgtagtaggaaaaatcgcgtctcgtctgcactcccttttggtaagtgaagatgcttcgaaatttaaaaagatcatcatgatgcaattgttaatggttacgtttatgtgtgtgcttatgtcgacccttagcctgattgtaaaccaaggcgaatggagtcatctaggtattcttattttacgcaattattttgttgctttatttttgcaaatttttatcgtgtcaccgtttgtgcgattaattagtccgcggatttttgcccttttgtaaaaatgaaaaaacgcttagtcgagtttaggcccggctaagcgttttgttatttatgttcggcataataagcatcgagcgcgtcttccacggttttcttcgtgtagccgttatcgataatgtagccaagatcatgttttctaaagcttgtttttaaatggtcaatgaggtcagcgaagtaatactcgatacctttatcatccagccatttgagtaagtctttcatagattcggtagcggttgtatcgatattaataatcgcactcgcttcaaaaatgactagttttgtatcatcttggactgcttcttttaagccatctgcgaatttattaaagtttccaaagaaaagggaagcgctataacgataaataactacatttggaattggtttggcttctggtttacgttttaagtcaaagtaaccatggcgcccgtcaataacaccaagaatcgcaattggtgatttcattgagcggctgactacattgatgaacgataagaaaatcccaagtagtaccccgaaaattacacctactaaaagtgttccaagagcggcaacaatccaaacggttgcttcacgacgagaaactctgaataaaccttttaacacatctacatcaataatgcccacaagtgcagcgaatacgatacctgaaagaactggttgtggcatatagtaaagtaagccacttaagaaggcaacaatcagtgcgataatagttgcggcaacgatcgaaaccatttgtgttttaccacgaaattgctcgtttgcagctgttcttgatacgctggcactcgccggggaacaaccagaaaacgcagcgacgaaattagaaataccgtaagcaaataactcacgattatcatcaatcgtatatttgtttctcattgcaaaactttcacttggtaatagtgaaccggcaaaggtagcgatagcacaaactaaaccgccaccaatcgcaagtgcccatgaacttgccccaaaatcaggaagggcaagggaagggaaaccaaccgggattttaccaacaatatctacattatattggtcgagtttgaagaaataagctgccattgttcctagtactaagacaacaagtgacatcgggatttttggaattacttttttacaagttatgacaatgatgattgtaacgatacccattgcaaatgaaatccaattagactggaaaaattgaccgaaaataatacctaaactagaaaagaaactatctccgctttctttaagtcccattatttttgggatttgccccataataatggaaacactaagtcctgaaatgaaaccacttagaactggagcagatatgtattttgcaaaacgacctaattttaagatggagaaaagtactaaaaagaccgcacaaaagaatgctagaatcggggcgagtgcgatggcttctttggatcctgctgcaagtccagctgttcctaagataattgacccagtaatggcgctagctgtcgcatcaatcccaaaaattaattgcggcgaactggcaaaaataacataagcaataaccggtaaaaatgatgcatataaaccatagatgggtggaagtccagctacttgcgcgtatcccattgcaaccggaattgtcagtgcagcaaccccaacacctgaaataacatcattccgtaaataggatgctttatacccatttaatgaaagcaagatgtgtttaaacataagttcctccctttaaaacatagtaattttcttcttctataatattatttaaatcttatactatttaccctgttataagttataccaaccctattttggtggattaattaaaaaaaacgcgattttcgttaaaaagaaaatcgcgttttttttaattgtttttggcataaatcgccatagcttctttcagaaaagcagaaaggccatcaccaaactggtcgatatttttagtgaaacgttcatctgccacgtacatttctccgagtcctgcaaatgcttcaagcgagtataaattcccgtgagtatcatttaaatattgaaaaaactggtggactgcttgttgggcttcatttgattctggggcggattttctaacagcggccaattggcgaaattctgcatcaaaactttcttttatagccatttgttctttttcattcatattagtgattttttcatttgcttgatttacaactttatctccccaaagttttcgtgcttcttcttcatatggattagttgaaaaatcgaagccagtaaatttttcttcattcgtcataattatttctcctttttcgttcttgatggtttggtcaagggtttcgagcatcgcttcaattcgtgtttttttctctattaataaatggcgttgcaaggataaagcgacttctttatcaaaactagggtcatcaagaatttgctttatttttttcaaagggaaatcgagttctttaaagaaaagaatttgttgtaatttgtcgacatctttttctgaataaatacgatagccgttccagtcgtctttttgcgggacgagtaggccgattttatcgtagtgatgcagcgtgcgcacacttacaccagtgagttcagctaattcttttgtttgcatgaatgattcctccttctgatttcaactataaagtatgacgcgacgtagtagtcaagaaagtttttttgtttattataactcttttagtggaaaagtgttgctagtaaataagttgttcgcgttaattgtaataaaataaataaaaccatggaaaaacttatgacattctcgtataatggagtgtaaatgtgtctaatttgtgaatggaattagcggaaataaaaaggggatagcatcatgacggggaaaataaaatccattagtacgtggctatggcatcatctaacaccgcaaatatttgcggttatttgtgtttttattataactattattgcgctttttgtgccaccttatattggtatggctgataatggagacttttttagaatattctcaagcaatggtttatttgtaaataatgctaattatgacgcgttacaatttggacattttgtgaaggagttcgggatttatcaatattttaatgaaaatcaagttgcgatttactcctcgcaaagtatttttattcaaattgcgcttcttttaaataaaattttttggtcaacaactgtttttgatgtacgttttttaggtgctttgcaattagtgcttcttttgccagcgatttacttattagtggctggtttaacggcaaaaatgaaaggttggcctggttacgttattgctgtgctaactgtatttattttcgcagataccgcttatacagcttattttaattcgttttttagtgaaggacttattttgattatgatgctgtatatttcagcgggatttttacttttatatcagcataaatataatgattatgcgatgttaggcttgatttttgtagcgtcccttattttaattacggccaagcagcaaaatgcgccaattgcggttgtgattgcagtttgcggtatactcgtgtttttcatccggaaaaatcgcgcgtttcggatttcggcagcggctactttttttgttattttcatgagtggtgtagtgatgtacgcattcattccaggagagtttgtcacgataaatcagtatcaaacaatgactcgcggtgtgttgcttgattcggaaaatccggagaaatcacttgaggaaatgggaatgaactctgaattcgctttgcttaaaggaaccaacttttatcaaaaatataaaatgattgatttagattcgaaattaatggaacaggaattttatccgaattataattttgtcacggttttaagttattatttggaaaatccgaaacaatttgggaaaatgcttgatttatccgcgcaaaatagtttttcgattcgaccatttgaaatgggcaattttgaaaaggcgacaggttataaatttaaagagaaaacgcattttttctcggtctacagtgatgtgaaggaaaaatttgctccagagaaattcacgtttttgattttatgggcgcttgtttttctgattggatatggtgtgagtgcgtttaaacatttccgcgaaaagaacattcggggaacgctactgtttgatttagtcgttttactgattggctcaggatttgcagtgattttagtaacaattgttggtgacggagaagcggatttaacgaagcataatttcctgtttaatgtttgttttgacttaacgatgttgattggagcggcttcattactcgaattttatttgaagaaacgaggtgagcggaatgcgtaaaaaaatcattataagtattctttttgcttgcgtcgctttcgtagtaagcacccatcctcaaacagcaaaagcagatagtgatgtggtcgttttttatgatagtttggcaaaagggacggataacgaagggaatatggactcgctacttcgaatgttaaatagtttgggaaaacgggtgacgatttacgcttgggaagagaatccggatctaagtcaagcgagcgaaattatcgtactgcaaaataaaaaggaccaattaacggataaatggaccgagaaattagctgaaagtaaggcgaaaattgcatatataggtgcaaatccaccaactttcttagcgaataaattgcagttgcaaacaaaagcgattacagatacttccatcactattaaaaccgaggcaggactagcgggaaaacctcagttagtgaacgaaacaaatttaattacttcctataaaggagaagcgttaggcgaaatggatgctgcggaaaatggcaaagcagcatacggtattcgagctggaaactatgcatatacgccaatatttcaagcaaataatacgagtgaatttgcgttgatggatttactcaaagcagtatttgaaattaaaactacgacgaatcaatatgcgcttataaccgatgtaaacccgtttgttgattttgatttacttaaaaaaacggcagacacattttatgaaaaaggaattccttttattataagtgctgggccggttttctataatcaagattttcaagcagcaaaaaattatgcggaaattttacgatatgtgcaagcaaaaaatggcactattatgatggatgttccagtcgttacgtacggtgatagtccgccgggagaccttgaaaacattatccaaaaatcgttacatttttttgcagaccatgatatagcggcgctcggtgtgacagcagagctatattggaattttgataaagtatatggtactgaaggctttgaaccatttaatacaggaattttactaccaaaccaaaaaattattcatacaacgaaaaagaacaacggtagcgcttttgaaaaatcaccatacagtgtagcaaatgatttttatgaaacgacgacaagcggaaaaaactttcctgttgatatagcagtgacttattcatttttccagaatgagaaggagttaaaggctgctgcgaacaatctagcaaatgaaaacattagtgacttcagatataaagatcatcaagtaaaaacaaataaagacacaatcgaatcaaatgctggctcgctttatatcaataatcagtccgtaacgctagatggtgatttaaagtatattaaaacaaataaagataaaactaaaaaacaagctggtagtttagaaggatttttcggctatcaaaatacatttttcacgataattattgtactttctcttggaattattggtgttttattcatctttggataccggctttatatgaaaaaatatatgaaatgaggtgaaataaatggttgttgcagattatttagcattattcgcggtggtttgtatctggggacttttactaattaatattgtattaatcgttgcgggatatatctattatttgaaaaacgaagcgcgtaaggtgcctgaaataccagcggaagtaccatttgtttctgtcatggtgccggcccataatgaaggaaaagtaatcgtgaagaccgtagaatcgctactggcttttgattatccggtcgatcgttacgaaattattgtcattaatgataattcgtctgataatagcgcagaacttctagcagctattcaagcaaaaaatccaacccgtcagttaaaaataattaatactgataacgtaacgggcggaaaaggaaaatcgaacgccctcaatatcggatttgcggaaagtcgcggcgaactggtggcaatttatgatgccgataatacgccagaacgacaagcgctacgaattcttgtcggcgagattaccaatgatgcaaaactcggtgcggtcattggtaaattcagaacgcggaatcgaaatgcgagctggttaacgcgatttatcaatatcgaaacattaagctttcagtggatggctcaggctggtcgatgggcgctattcaaactgtgcaccattcccggtaccaattttattgtaagaagatcgctcctagaagaaattggtggttgggatgtgaaagctgtcgctgaggataccgagattagttttcggatttatatgatgggataccgcatcaaatttcaagcgaaggcagttacttgggagcaagaaccacaaacattgccggtctggtttaaacagcgctcaagatgggcgaaaggtaatatttatgtgattttaaaaaatgttccactccttttcaaacgagaaggtagacgcgttcgcttcgatattttgtactttttatccatttactttttattattaacttccttgattgttagtgatgttttacttgtattatatgcgcttggacttgtacatacgacgcttgctggccttagcggggcgctttggttgcttgctattttactttttgtcgctggtacttttattacgctcaccactgaaaaaggggaaattagtttttcaaatctattatttattatgttaatgtatgtgacttattgccaactttggatggtggtcgccgcatatgggttctttattttcttaaaagatactgtactaaaaagagaaaccaaatggtataaaaccgagcgtttctaaaaaggagagtgcctaatgaaaaaattagctgttatggggctgcttgttttcgccgtactatttctgtataggccagacgttttcgcagcagataaaaattatcaaacggtttttggaacagataaaaccgctcaagggaaattcacgacaacgaaacaaaacttcactgtggagaattattgggacgtgtcaaacgcaaacgtgaaacttgtatacacgattacccaactgagcgaaagagaagtttcaacaatgacattaaaaattaacgatgttgccttttactcatttaaacctgataaaaccgacaaaggaacgaaacaaatcgaagttgaaattccaaaagataaactaaaaaaaggtgtgaacgttctatctattgaaagttttgtctacaccgatttaccagatggtcgttgtacgattgatgatacgcctgccaattggctacaattcgacaaaaccagcgcggtaaacgtttcttattctgataaagctttccaaaatacggtcgctgattttggcgaacgcttcactggaattgatactgtgaaaagtgggcaaggcgcggtagctgtcctcaaaaaagccggcgacgcagaacttggcgcagcgcttgaaggcctttctggattttcagcagcgaatacgttagaagataaaaatatcacttttggtcagtacgaagaggcaaaaacgcgcgatggcaaaaactatatcgttcttttttccagctatgacaatttaccaaatgacataaaatcacaaattaaagacgatcaaaaactagaaaagcaagcacttttccaagttgtgaaagtaggaaacacaaacacactcgtgattacctctaactcaaatgatgcccttaaaaaagcagggaaattaattgccaaccaaaattacttaagtcaactcggagcaaatactaaatggctaacaacggatgaacaaattgacacgccagccaacaatattgataaaaataccaaactcacaacaactggtgataaactaaaaggaattggtcacatcacgcaagattatttcatcagtatgcctgcaaaccgaagcgcctcaacaggaacggagatatcgcttgatttcagatacgcccaaaacttagattttgagcattccttagtaacagttttagtcaatggaaaaccaatcggtagccaaaaactttctgccaaaaaagcaaatagtgataaagtaacgttccaaattccaagcgatttaaatgtaaaaggtgatttttctgttacagttgcctttgatttagttttaacaaataattattgtggttttattgcagattccgaaattccttgggcgtatatcacaccagaatctaccattaacctgaatacaagcgaagaaacagacttgttatttgaacaatatccatacccattcgttgctggtggagattttaacaatgcagttgtcgttgttccggacgaattaacaaccgaagatacggattcgttagcaaatattttcaatctattgggtcgcttccatgatggaaacagaggcaatctaactgccgtacatgcgacaaactggaaaaagccaaaagaaggctcgaacattatcgcagtgggcacaatgaataacaatccagtcataaaaaatgccaatgatgacttatatttccagtacaacaaatcaggcagttatttcctttccaacgaaaaaatctcgattgaaaaaaattacggtaaacaactcggtagtgtacaattgattacttctggtggcgtacccgttctcgcagttactggtccgggtgctaaacaaacagagcttggttctgatttaatcgccacaaaagctaatttagctaaaatctacggagacggagcgattgttgataatgacaacacgatccactcttataggttcaaaaaagcagcagatgcaaaagaagaaagttttgggacaaaaattagtaataacaaagaagtaaccgtgtttggggccttcgcgcttcttacaatcgttatcctagttgtcgctgtcctactaatcttgcgtaaatatcgccggagccggaagtgagggagaaataaacatgaaaaaaataacgaataacttatttgcagatattggctttttatttttcatcttgctttgtttcatcacgattggctttatgattaatacgccagatgaatatttgcgaaacattattttattaaatatcacttttttacttgtgattatcacctattttacaaatttaacgcttggtttgattttaaatgtcctctatattttcatttatgcgacttacattatttatgaaattgttgcaaatcaaatggcatatggaatcggcagctactactggcttattattacgccactttttacggtagcgagtgcgatgtttacaagaaatacctccagactacaagaagaaaatacgaaaatcaaacagcaaaacttatatttaggaaccatcgatcaagaaactttacttaaaaatatcgtttctttccaaaatgacgagcgcattttttccagcatttcgcgtcgttatgatttaccattatcactgatggttatcaaagttcgtcactggcgcgagttgaaacgattccaaagcgaagatgaaatgcgcctggcactgcaagatatttcggcagttttagagacttgtatccgtacgagtgatgttctttatttgctagataaggacgatgcgacttgggggctcttgcttttaacagatgagccaggcgggaaattagttgctgaccgaattaaaagtcgcatagctgaggccaacaccgaagaatttgccgcgaagtaccgagtgaaactagaacttcgaattggaacaagccaatttgacagcgaaaaagtgaagacaccactcgattttattgatttagcgacaaaagaattagaatatgacgtgtaaaatagagagttaccttctataataggaggtaactttacttttttgataggaggcgcttgatgaacttagaagaaatagtcgcatgtatgttattaaatgaaaatgacaaagaaattcagcggacgcaaacggagcatcgtatgaagttggtcgacttttggcaaattaaaaaaggagaacgtgtccttgaagttggctgtgggcaaggcgatacgacggcagtgcttgcgagtgcagttggcgcagatggctttgttcaagcagttgacattgccccgagcacgtacggagcaccgtttacgattggcgatgcaacggctcacttgaaaaaatctaaactaggtgctcaaattgattttaaactagggacagatattttaaatggcgatattactttttcggataaagcttttgatgtggcggtgttatcacatgcttcttggtatttcagttctaaagaagagctaatcgaaatgctcgttttactaagcaagtgggcgaaacgggtttgttacgcggaatgggatacgagaattacagatgtgaaccaaacatctcatatgttagctgtattgacacaagcttcctacgaggcattcaaacaagaaacccagtcgaatatccgaacttttatcaccccagtagacatgcaagaaattatccaagctcatcattggaagataggcgcggaaacaagtattttctcagaaaaaatgcaagatagtcgctgggaaatcagttatgtgaaagattttataacaaaagaattagccgcagatataggtttaccagaaaagttcaaagtatttttactgagccaaagcaatttaattacactagaaaatagtttgccaatggcgtcgtattgcactttttggcatgcggagtaattttgctttctttttcacaagattgcgattttttatgctataatggaacgtattaacgaactaaaggagtgttgaatgtgagagctgtacttactgtaattggaaaagataatgtgggaattgtcgctggagttagtaataaattggcagaacttaacatcaatattgtcgacgtatcacaaacgattatggatggatattttacgatgatgatgatgtgcgatattagccagataacgaaagaatttgatgaagtaaaaacagaattaactggaaaaggtgaagaactccaagtaaaaatacatattcaacgtgaagaaatttttaacgcaatgcataaactataggatggaggcgattctagtatggaaactaaccaaattttagaaacaatacgtatgattgaagaagagaagctagacatccgaacaattaccatggggatttctttgctagattgtatggacggtgacggtgaagtagctagaaagaaaatctaccaaaaaatcgtgacaaaagcgcgcaatctagtggctgttggtgaagcgattgaatccgagtttggtattccgattataaataaacggatttctgtcacgccaattgcgattatagctggctcaagcgctgacactgactacgtagaatttgctaaaacactcgatgcggccgcaaaagaagttggcgtgaattttatcggtggttattccgctcttgtccaaaaaggttacacaaaaggtgacgagattctcattcgctccattccgcaagctttagctcaaacagaacgagtttgctcttccgttaacgtcggctcgactagaacaggaatcaacatggatgcggttcgtcaaatgggtgaggtaattaaagaaacagctgatttaacagcagacactcaaggactcggttgtgcgaaactcgttgtattcgccaatgcagtcgaggataatccttttatggcaggagcatttcacggagttggagaagctgactgtgttatcaatgtcggcgtcagtggtcctggtgttgtgaaacgcgctatcgaaaaagtaaaaggcgaaccatttgatattgttgccgaaacagtgaaacaaacagctttcaaaattactagaatgggtcaactcgttggtcaagtcgcttctgaaaaactcggtgttccttttggaattgttgatttatctttagcaccaacaccagcgattggtgattcagtcgcacatattttagaagagatgggactagagatggtcggaactcacggtacaacggctgctttagcactattaaatgatgcggtgaaaaaaggcggcgtcatggcttgcggtcacgttgggggattatcaggtgcatttattccggtttctgaggatgcggggatgattgaagccgtacaacaaggcgcccttaatcttgaaaaactagaagcgatgacggcaatttgttcagttggacttgatatgatcgccgtaccaggtgacacaaccgccgaaacattagctgcgatgattgctgatgaagctgcaatcggagtgattaacaataaaacaaccgctgtccgagtaattccggcgagcggtaccaaagttggcgatatggtcgaattcggtggtttacttggaacggcgccagtaatgccagtaaacggtaaatcctccgctagctttattgcgcgcggtggtcgaatcccagcaccaattcattcatttaaaaattaacaaaaaggtttcctcgtaaatttacgaggaaacctttttttatgtcgtttttctctctaccaaatggaaatctaaatcaagcagcggcaagttgcttccaaataattgattcataatgagcgtaaaagcattttcagcttgtaaatttacagggtaatgaatcgttgtaatatcaagcaaatgcgccacttccatattatcaaacccacaaatcgcaaaatcttccgggacactgtaaccaagccgtctagcttccgtaagtaaccccgccgcaaaataatcatttggtgtcaaaaatgcatctggtttatgctcagtctcactccaccaatgcgcaatcttttccccgtcttgccgactaccctgcccgtaaaactgtctaaattcatgaggatcaagctcataacgcgcacaaaaatctttaaaagcaagcatgcgactttgcgtattgagtccggtcgtattcccataaacattcacaaattttcggtaaccttttgcatataaatgttctagtgcaagcgtatatccatcatattgattcataaatacagaggggattttttcactctcgacacgctgccaagtgacaatcgggccgtatttggtataatgctcaattgttttccaatcatttgatcgaatcacaagaacgagtgcatcgatttgtttttgccgtagcatttctaaagcttccagttctttatccggatcaatccgcgtcataaacaaagtaacgttataaccatgctcttgagccatcatcgtaaaactttttaaaaatacattcagtgaatctgtaaaactaggaatgaccataccaattaacttagttgcgccttttttcagtgatacagcgttaatatttggaacgtaatctaacttgtcaataattgtctggacgcgttttcttgtttcttcactcacatagtcgcgattattaattactcgggaaactgttgctgatgaaacacccgctagtttcgcgatttcttgtatatttgccaattgcaaaacacctcgatttctcgtagctctgtatttagtataccaaaaaagcccgccaaatagccagtttagataaatttaaaataagtgcttgacctgtaatgcattacatgaattatgatgaatgagaagaaaagaaaacgctttaaaattctaggaggtaagtatattatgaaaaaaggtgtaaaaatcgttacaattggtgggggttccagttacacaccagaacttgttgaaggatttattaaacgctatcatgaacttccaatcagagaactttggctagtagatattgaagctggtcgtgaaaaattagaaatcgttggtaatatggcaaaacgtatggtcaaagcagcaaacattgactgcgaagtacatttaacactcgaccgtcgtgaagctttaaaagatgcagattttgttacaacacaatttcgcgttggtttattagacgctcgtattaaagatgaaagaattccacttagccacggcatcattggtcaagaaacaaacggagcaggtgggatgttcaaagcattccgtacaattcctgttattcttggtatcgtcgaagatatgcgcgaactatgcccagatgcttggttaatcaacttcactaacccagcaggaatggtaacagaagcagttcttcgttacggaaactgggataaagttatcggtctttgtaacgtgccaatcggagcagtgaaaagcgcttcagacgttttagaaaaaccagaagaagatttattcttcaaatttgcaggaatcaaccacttgcactggcaccgcgtatttgacaaagatggtacagaattaacagaaaaagtgattgatggtctttacgcgccagatgcgaatcctggaaaagttgttgaaaacattaaaaacatgcgcttcttatatgagcaagttaaacatctaaaaatgcttccttgtccgtaccaccgttactactacatgactgatgcaatgcttgaagaagaactggcatctttcaaaaacgaaggtactcgcggagaagtcgtgaaaaaattagaagacagcttattcgaattatataaagatccaaatcttgattacaaaccagaagaattatctaaacgcggcggcgcacactacagtgatgcagcatgtgaaatcatcaactccatttacaacaacaaaggtactgtaatggtagtatctactcgtaataatggcgcaattgatgatgttccttatgatagcgcagtagaaatcacaagtgttattcgcgcgcacggtgcggaaccaatcaacttcggtaaattcccaccagcacaacgcggcttgctacaagtaatgaaatcaatggaagaattaacaattgaagcagcagtaacaggcgattacgcaactgcacttcaagcttttacttctaacccacttgttcctagcggcgacttagcaaaaacaattctagatgaaatgctagaagcgcacaaagagttcttaccacaattcgctaaataattcgcaagtgatccctattttctagggatcactttttttgtgagttgttttagcgagcattttttcaagtttcctgtaaaatagaaaaaaggaggtatgcttcatgcaaacaaatcttgaaagaatcaaaaaacacatagaaaatttagatagatttacagcaactccgggtcagggaacaactcggcttacatatagcaaagaagacctcggcgcgcgtaattatttaaaagaagaaatggctaaagtaggccttactgtctcagaagatgcgattggaaatatctacggacgactagaaggcgacaatccagacataccagcagtaatcgtcggttctcattttgactctgtgccaaatggtggtgcttttgacggtccagcaggtgttataactgggcttgaagtagctagcgtttttcatgaacagcaaataaaaccccattttccacttgaaatcatcgcaatggtggaagaagagggatctcgtttcggagcgggactacttgcctcccgaacaattacaggaaaagttacaaaagaaatgctacatgaaatgaaagatataaatggtgttactgccgcagaagctatggcaaacctaggatttgacgcaaatcaagttcatacagccattcggtccaaagattccgtcaaagctttcattgaactacacatcgaacaaggcccagtcctagaaaatgcgaatgaagatgttgcgctagttgacacggtcgttggtttaacagaaataaaagttaccgtaaagggtcaagcaggtcacgccggaactaccccaatgctagaacgaaaagatgctctaagtgcagctgtccaaattcttaataagcttcctgaactagctatccaagaaggcggcggaactgtcttaacaattggcaaacttaatgtctacccgaacggcgctaatgtaataccaaacaaagtcgttttcacagtagatattcgagcaaaagacgaaatccacgtccaaaatacattagaaaaaacaaaaaaagttattcaagctttcgaaaaaaacggtattatgtgtgaaatagaagatatgctctatgaaaaaccaacacatttatcaacagaaattcatcaagcattgaccgaaagcgccgataaacttggtcttaaatatcgaacaatggttagcggcgcaggacacgatgcaatgattttcgcaagtttaaccgaagtaggacttatttttgtaccaagccacaaaggtataagccatgcaccagaagaatggaccgattacgacaagctccaaaaaggcatcgaagtcgtacttgaaacagttaaaaaatggacgggggaaagcgaacatgaataataaaataaaacaaatagtcttaaataatgaagaaaatatgatagccttccgccgcgatttgcacatgcatccagaactgcaatggcaggaatttcgaacaaccgatcaagttgcaaaacaactagatcagctcggaatcccttaccgacgtaccaatcccaccggactaattgcagatttaaaaggcgataaagtaggcaaaacgattgctttacgagcggatatggatgcactaccagtccaagaattaaaccaagatctttcttataaacctacagaagacggcaaaatgcacgcatgcggtcacgatgcccacacagccatgctattaaccgcagcaaaagcactcgtggaaattaaaagtgagctacgcggaacagtccgcttcatttttcaaccatcagaagaaattgctgaaggcgcgaaagaaatgattgcccaaggagcgatggagggcgtggatcacgtctttggtatccatatctggtcccaaaccccaagcaataaaatatcttgcgtagttggctcgacatttgcttctgcggatatcatccaaattgatttcaaaggtcaaggcggtcacggagcaatgccacatgatacaatcgatgctgcggtgattgcttcttcgtttgtcatgaaccttcaagcaattgtagcccgtgaaacagacccgcttgatccggtcgtcgtaacaattggaaaaatggaagtcggcacacgctataacgttatcgctgaaaatgcccgattagaagggacgctacgttgctttaacaacacaacccgcgccaaagtggcaaaaacaattgaacactacgcgaagcaaacagccgctatctacggcggcacagctgaaatgatttataaacaaggcacacaaccagttattaatgatgaaaaaagcgcattactcgtccaaaaaacaatcattgaatcattcggtgaagaaatgctttactttgaacgcccaacaaccggcggcgaagacttcagctattttcaagacgaagctcccgggagttttgcgttggttggctccggaaatcccgaaaaagataccgaatgggcccaccatcatggacgttttaatattgatgaaagtgtcatgaaaaacggcgcagagctatacgcccagttcgcctataattatttaaaccaagatgagatttaaacaaaaaacagcctcaagcgaattcactcgcttgaggctgtttatatatcgactattgtttttctacaacatgtacgtcttcaaaagaaccgtattttgtccaccaaggaacggcaccttcatcaagtaatttatcaagagaggtaatattttctttcccttgagtacgaagccattcgcgtaaagcatcatcgccttgtttaccataaacttcgataccatcagcccaagttgcacgaccacaaagtacaccactatattgtacgttatgttgattagcaaattggattgttttatggaacatttcagaagttacgccagcacttagataaataaatggaagtgggcttaagtcagagcattcttcaaaatgacgagctgcttcatcttgcgtataagctacttcaccttcagcaaaaccttccacatatttgaagtttactggaacctctagtttaagtacatctacaccgtaacgaggtttagagaattctttaatagatgcttttactttcgctggttttaattttgcatactctaaagaaccagaatcagtaacttttgcatcgtaagtaattggttctaagaaaaatggaatatcaactgcgcgacattctgcaccaattctttctaaaaaggcatatttaatttcattgatttcagcaggttcatctggatcataataaacaagaattttaacagcatctccgccgttttctttaatacgaagtgccgataaatcttcaattaaatcaggaagtttaccaggagtagttgcgtcataacctgttttttcataagaagttaaaagtccgctaccttcgtgacgagctttgattgctggagtaccatattctaaatcaagcaaaatcgcagaagcataaggtgtaagttcttcagaaacaagttgtttgaagtcttccacatcttttttgttttctgttccttttgcttgttgaatcatttttttgagtgaaccgcgttggtcaatggcaagtgctgcaatgacgcctttatcgttggagagtctttgtaaaccatcaaatttaccttttgttatttgtaccatttttatctagtctcctttatagcaatttgtcgttgcttttatcaatttgtccatcattagtataccacttataactttttttaaaacataggtatatttccgtattgatttatcctggataataaattactatatatgtggagtgttaggtattattagaaatttgggataatttcttttaatacattctcttttgggaaagtcagttagcgattagactagaccaggagtgatgaaatgaatcgacgcgaaagactaaaacataaaagacgcaagaacgtatttatcgtgttgagtactgtacttatacttttttttatggccactagctggatgatctatgaatttaaaagtaaagaacagcaaacagtatccgcaccaacaaagaaaaaagcaactacagccactaagccaaaggaaaaaccgactaccaaaaaagctgaaaagccaaaagagccggaacaagttgaagaaaagccaaaagaaacgatagtaaataacaaagaaattgatgcttatttaaaagaaatcggatttagcggctcggcacttgttgttcgtgatggacaaattgttatacaaaaagggtatttatatgcaaatcgtgatgcaaaggtattgaatacgcctgatacgctatattatatcggttcttctcaaaaggcgataatagcagcagctttattacaattagaagaaaaaggtaaaataaatacaaacgatccagtatcgaagtatttacctaattttcctaatggtaataaaatattgattaaaaactttttgaatcatacctctggaattgtcggacggccagagttctctgggactgtaacgccagaacaattagttacaggtattgagaagcggggaattaaatcacagcctgggaaatgggattatatggatgcaaattatacaattgcaggatatatcgtagaaaaagttagcggaaaaccactcgcaacttatttgcaagaaaatattttcgaaccagcaggaatgaaacatactggatactttcaaaaagatgttgatgggggaaaaaatatatcaacaggctacaaaatagatgaaaatggagtttatcaaagtccgaagttagtagacttaacgaaattatatggagcaggggatattagtatgtctactacggatatgtatttatttgataaagctttgatggataaaaaaataatctctgaagcaagctttaaaaaaatgttcacaccgggtagtaaatctaattatggaatgggcttttatgtagatcctgggagttataatagccacggggttgtaactggttgggatgtttctaatagcatgagccacactggcagaacctatgtgattttattctctaatgtccaaaataagattgcctcttttggaaaagtgaacaatcatatttatagtttattaaacaaataaagaaactcgattctgttaacagaatcgagtttttatttatttaccagtaatttgttttaccgcatcttccatttgataaagttgagcagcggcactgtagtcactccatttggtgttgtctactttatatacttggtttttcttcacagcgggaatatctttccaaaccccgttaagcatttcgttaacagaatcttcattaccatcagtaggcattaagataaataatcgatccgctccggctgcatattcaggaatagcttcacttgaaattgcttttgtttctttgtttgctttagcaccatcagttggagtaaaaccagctccagagaataagccgtcaaatactttcgcatcatgaacatagatttctttgccgtagaattgaatcacagcagctttttcgttctccacgccagcatcttttaacgttgccttagcttctttagaactttgagcgtaatctttgtcccatttttctttttctgattttttatttaagagatttgcgatattagaaagttgtttgtcaggagtatcaccgaaatgtgagatgtaaactggcgcaactttttctaaattctctaaaaggtctttttgataatcactaataataattaaatctggttttaaattagcgattttctcaatacttggtttatcattaccaacactttctgtcccttttgttgctttgggatatgtagtgatgtaataatccgttgtaccaacaggttttacgcctagaatttccatttcacttacgttttgaagtgctacaattctttttggtgttgttggtacttctactttacgatccattgtatcagttactgtttttgtcgcagcttctttttctttgcttgaatctttatccgaagagttgccacaagcggttagtactactgctaaaagtacagtcattaaaatagcagcccatttatgcttttggtacattgtgtatttcctccctaattgaaaatgattttcattatcgttacaaaagtaattatatcgaaaagagggaggattgacaaggtgaaacataacacaaattatttttattttttaaaattggatcgtgtcgcctattgccagggtaggaaatacttctggggagacaacgattgcgccaggtaatacttcattttgaccagagcggaaataaatcgaaatgtgtccaagttcttccaaatttttatttgcttccgtaccgacttcttctattatatagacttgatctccaatttgtagtgtattccctttcgagagggcactttggggtgctgcttcgaactcatgaataacggagatttctcgtaattcattagtggctgttggtccaaataaaatgacgatcttttcttcttcaaaagctgggacaagtggcccgatttcaatgattttacttttagtcatagcaatttcctcctaaaaattaatacatgccgatactgaatacccaagcgataacaacagcaaggacacctgtaatcatacggctatacaaaatggccggaacaccgaattgaaccgtttttggtttagcttctgcaagagatagcccgactggaataaagtcacatccggcttgtgcgttaatagcgaataaagcaggtaaggcgtaagttaccgggatggcgccaatcgcaatttgtgaaccaattaagacaccaataacttgggcgataactgcgccaggaccaagaatcggtgataggaaaggtagactacaaataaaagcaattaaaagcattccccaaatggaaccagcgagcggggagagtgtattcgcaattaattttccaatcccagtgtagttaataataccgataatcatactaataaaagccataaaaggaataatgtttttaatgagcatatcaacagaatcacgaccagcttgatagaatacgcccattgccttaccaataccgcgagaaaatttcacaagatagccttcttttaaatcactcgcttcttgttgatcttctttaatcttggcataatcttctttaaatttttctctgtcaaaaggttttccgggatctgcttctgatgaggtaaccataatatcttctggcttcactcccgaaacaaaaatatcttctgtaatatgttttgctagtggacctgatggagaagaagggagaatatcaacagttggaatacgtttcattggatagacgccaattcgagccgtaccaccacagtcaatgacaacacacatcatttcttcttcgggaatggagtttttaaaaccatcgacggcttctgcaccggataattcagcaattttcaaagctacggggtggataccgccgccagtaatagaaacaacttttgttcttggttcgcttggagtaaggtctagcccagttccccaaccgccttggcctttattcacatgaattgattgatacattttatttgcctcctatctatttcagactttttcttttcgcattaagaattttgtaatggtttccgtaatcacaccgcgcattaaaatgataacaatacctgctaagaagtaacgaactgcaagactagacatactataaccagcttcgacaaccccattagcaattcctaaataaacaaataattctccagcattcgcataagggaacaaccctgtgactggatgtaaaaatgaaacaaccgaatcataaaaagcaggtttttgatgttctttaacgaatcgtccaaatgtgtatgccattggatttgttagcattaagacagataaaatcggcataagtgaataacgtaaaatcatgtttttagctgaaaattgaattgcacgattgactcgttcttccccgataaatgcaataatcgagtacgtaaaggttaaaaggacaattaaaagcgggacaattcctgtcataaagctcacgaactgttttccaccagcctcaaaaagaccgataaagttggttccaaaccattcaatataattcactaggaaacactcctttttaattatttaaagcgctttcatacaactgttggcagttttgataatggctttttcttgtatggaatgctttttcttttcatgtaattcttgtagtatttcggataattctttctggtgatagtcagtaaatgttttaaacttcgcaaaaatcgtttttcctgttaaaatttggcattcatgaacaatatgctcttcgtttacaactaagatagctacggcacttgttcgaaactttaatcgctccatttcagaataaagatggtaaccgatttttccagcatatttactcgcaactttattcatgtgatgttggtaatacctcacttgaaaaaaagcaagaaatgtctgagcgatgaaaataacggaagcaataaggacaattttcattcacttttcctccttataataggtgggaagggctagcttcccaccatgttacctttaattgctaaatgtttcgtcttgtagttttctaagtttccaaacagtagttgattcgtcgagtgaaacatcttcgtcggtaataaatgtgccagctttaatgtttctgcgtgcaactacttcaccgctaattagcccgattggaatatgaccttctgccgccatatctacgtgagtttcgagcacaccgcggacacagaaaccgccaatcccatctaatctttctccagcagctatatcttttttagcaactgcaactgtttcggaaacgggagctcccataggaacaatagcgtgatcgtgattcagaacagctttcgcaatagttagtggagtttctaggctcgctaaatgataaggacgatacagaatatgatgatcgcgttcaccttttttcattaagtagctaagttcatgactaacaccttcattttggcctttaacaattacgaaaacacctggcgccaagccatctacatattctacgacaccaaattggtttaaaataccgccttgctcttttaaatcgaggtctttaatgacggaatctacgtcacccgagataccatgcattccaacgacatcgggaacatatccaatagcgtttgaaagtaagttcatttctgccattgttttcgttccatcttggaaagctgctagcatgtgagaagccatattttttccgtctgcttccacttggcaactatctggattagcgctaatttttagtttgttgttttttcctttaccggcaacaagtacttccatacccattgatttggaaaattcgtaaagttcagttatcgcagcgggttcgtctccatcagatccggtataaacgaggccagcgctatcatataattttttcattaatggtccaatagtaatgtcaatttctacatttaatagaacaagttgtttttttgcaagtaaagtttctagggaaatttttgcaccgacttctggaacgccagtggcatcgacaatcacctctacaagatcagaatgaataatttctttaaagtcatttgataatagaattttttctttttttgttgctgtggcgttgtatgcatctgcggctttttttgcggcgtccacatgaatgtcacttataccaactacactcattccaggaatagcggcaatttgcgaaatcatgccgaatcccatttgacctgcgccaataacgccgacgcgaatagggttattttctttctcacgggcaagtaactgtctatataaagtcatttcaagttcctcctagtaatcgttttcatttattaaaaataaaactccggataaagctattttatcttaataaacgaatcgtgtaacatttgtcaccactagtgacaaatgtcatatttcacaaatcaaatataacattttaactttttttcgtcaatgaaatattaaatgttttttattttaaagaaataaaaaaagcccaatccattgttggagagtgcttttggggttttatattttttttgtggtggaatattctcaatcgtttttttgtaggatgtattcagccattctatcagtaatcacaatcacatctatcaatccggcattaagtgctgaaacaagtgcgtcttttttttgtagtccatttgctaaagcaacgactgttgggatttttttgagttcttctaaactgagcccgatgacatgtgtatttatctgtgtatttgcttcttctccatttgccgtgaaaaaccgtgaattaatatcgccgacaacatctttgtatcgaagttcttcaatatcttcgggggtaatataaccaatttcttccattgtactttgattgtaagggcttgatactccaacaatagccatatcaacagttttaccttcttcaaggacttcattaatgtatttgtttttagagaggtcggctttcatttccgtatcttctacaagggcaggtgcatacaaatatttactatgacactgcatttttttctttaaatcgtagcaaatttggttggaatggaggtcaatatcgcttgatcccataccgccgattaacggaataatagttaagtctttatgagggatatacgggaattcattggcaaatttacgaattgttttcccccatgaaatcccaagcgtatttactttggcaattcttttactaagcgtatatgctgcttctttggctagaaaattaagggcttcttcttcggacatatcgtgtgtggcaacgacaatcgcttcttctaaaccaaacttttcttctagtttttgttctaaatctaccgtatagtatgtttcgtctttaatgaaaatttctacaatacctaagtcttttgcacgttgcaaagttttagaaataattgaccttgaaatcccgatttttttggcgatttgcgcttgagtccaaccataatgatagtaccatgtagcgattttcaccatatctcttttttcttcccatttcatctttgttacctccattctacataataatggaacaaaagttatctgtagtcacaaatgtttttatgctaatagtatcatagaattgcccgtctggaaagatatcggagggatatatagtgctttagtaaagagaaaatgaatttttatatggtttttgctaatttgtgacaaaataacaaacaattttattttgagatttacgagggattttgcaagcgtttttaataatttttgagtggaaagcgtgtaatttgttctccatagagaaacaccattatttgatgggtggtagtataaatttagttcttaacgagcccaacaataagctaattaaacagttcatcttagaagaggagtggattttagtggaagaattatttacatacaaagaatttatcaaaatgatgcaaaattatggaattagacataaaaaacgcaaattaagacgtaatgaaaatgtaatgaccaattcttcaagtccgaatagtgtcattttattaataaaaggttatatatgcagttacacatgcgagtcgcctgaaacactattatctgtttttgagccaggcgtatttctaagttattcgattttagaagatttgccaccgcttgtaacgaatattgcgctttcagaagagtgcattgtgtatgagtatgaaaaagaagacatcgaatatgcattatcgctcttcccagaaaactttggctttcaatatttctttttaaaaaagattggacgtcatttatactataaggctttacttaatgccaaagatcaccaagaaaaattatattatacgattaagtatttaggaaaactcattggtgaaaaggatggaaaaggcaatattgtcttaccaccagaaattacaatcaaaatcttaattgaatacagcaccttatcaaaagcggctttttatagacagcgtatccgtctaatagaagaagaaattttaaagccacataaaaaaactttcttagtcccgaagaaagtagtaaaacactatgaaaaacagctaactagtatttaaaaaggagagcttaaaaaacaatgaaaataaattggaagaaagttctggtttttgttttgattttggcgcttatcagtcccgtttactcgaaagctatagagacggaacaaagcatatcgccagaacaaccagtggagccggtagtagaggaagctataaagaaaactccagaaaaaaaagaaatggaaccagaaccaaagaaagagccagagccaccaaaaaaagaagagattgaaacaaaaaaaccgtcgaccgaacctagcaaactgaaagctaacccttcatcaatacccgagaatagtacgatagcagatttatttccggatccggtaatggcagaatcggtagttacaaacttaaataatcaaatccgctataaaaatgattgggttgtgactgatgttattacacaaaaggatttagataatctatcttcttttactgatttatccacagtaattataaaaaatctggaaggtatacagtatatgactaatctaaatagaataagtttaaggtcagatgatgatttgcaaggtctatcagctttattaaaagcaccaaatggatatcctaatttgcaggagataactattttaagaggaggaattacggatatttcaccgatcttaaaaataaatgcaccaaagttagcattcctaaacttatctcagaataagattagtgatttatctccatttgctaatctgccgaacaattttcctgtgctggaggaaataatacttgcgtctaacaatatttcaaatgtcgagcccttagctaaatatgctagtgctagtatgaggtttcttcttcttaatagcaatagtatttctgatttatcgagttttaaaaataattctatgccaaaactagtcgaaattgtgtgtacttatcaacaagtttatttagaaccaatggatctttcagcaaaatatgattttactttaaaggcagcagaggctaaaggtgtgaacaaatcaattcctataactgtgttcgatccaattgcgacaattgataatacaacttccatgattacttggaagcaaaatgtcatagaaaagaaaccagaaatatttttaaaagaaggtggatttcaagaaggcgttaaatatggatgggatgaaactactccggttaaggatgatattggcaaggtaatctttgatggtacattttttcaaccattagtatatatagtggctccaaaaattacatcatatgaaaaacaacttatttatgatattgacacgccactcacagaggaacaattgttaaaagatgcaaaaatcgtaacagaccaaccatcaaaaatcacaactaattttaaagacaaaataccgagttcgccagatcccactaaatatgtagtgacaatcgaagcttctaatatagatggaggtgagtcggtaaatgtggatgttatatttcaaccaaagccacctatcataactgcggatgaagaatatacctatttagttggtgaagctattgatgctaatcaatttagattagacgtgaatgcgactttgactggtgttggttcgctagtggatgattttgagtcagtagtagacctaacgaaagctggtgattatgttgtaacgctgtcgtctcccggaaatccaccagcttctcaaacagctattcctgtaaccgtagttgttcacgtcagagaaagtatggagctccaaattcctaatgattttcggatgggtatagatgaaaattcagaatcggtgccgatattaaatagaaaacaaaccctgaaatgttatggggctgacggaaaagtagatttaaaggtgacagatagaaggagatcaaagcaaggctggacgctaactggagcaatgacaacatttacaaatagcagcggtgacatcattcaaagttcgctaaagtatcaaagtaaatcatcaggtagcagcccagtttacttaaataatgcaaatcagcctattgaacaaaaacaagcaactcctacagaaacaggctttgtctctactattttcgacttagaggatagtttatcaatagaaatccagcctaacgatgctttagtgggggatgcttatgaatctaaggtaacgtggactctagaagatgcgcctaggccttaactaaaaggagctattcgatttgaaaaaaataggattcattatattttgttgtttattcttattcgcagcaccattttatgtagaagcaaagacggcggatacagcgactagtaaagcaagcgttgtaattaagaaagaccctcgtaaggccaaaagtgggacagatgatagaacaggcacgtatcctacaaagttccccagaaagcttccgaaaactggggagtcgggcgatttaccacttattattgccggaattagcctcattttatttgtaagtaaaaaacactttaagggggtgagggaagagatttaattgcttagcacgacaaaaaaaggataacagaaagaggagaataataatgacaagtaggacagtaaaagtaacaacagcaagtttattagcactaggacttattgtagcaccagtactttctggggattttgcttcagcagcaacttccgtaacacaagattcaaaagggattgtaaaatttgataaaagcgcaactccagatccagttccagtagatccagatccaactgacccagatccagttgttccaaatccaactgatccaccagtaggtagtgatggtctatggattttagcagtatctaattgggactttggtacacttgactcatccgaattatctaaaggtgcaataaatgcccatgctaaagatggaaaaattactacgtatgaagatactaacggaaatggtaagcaagatttaccaggagaagtttctgtaactaaagatgtaactcctttcgctcaggttagtgatttacgtggttcgaataatggttggactctttctgtaacaggtagtgagttcaaagattcttctacacctgcaaaaaaaatcgctggtgctgagttaactattccaaaatctacagttaaatcaaaagattctaccgcaaaagcaccaactggatatgataacgtagcaatttctatgactggcggagcagcagttcctgtaatggcagctaaagatttgcaagctactacaccaacagacttcagtgatgatgaaggtatgggaacttggacagatagctttggttcagcagaagtatctgcaacagaaacatctaagccgaaattatctattcctaaaaacgtggctgtagcagaaggcacttatcaaagtacattaacttggactttaagcgatacaccagcagtctaacatttttcaaaaagagaaaactgcatttttcgatgttgttttctctttttaaattgagtaattaggaggaaagagggacttgaaaaaaatattcgctatcatctttgcctgtacatttgctattatttgtttgccaaatcaacacgccgaggcagcagaaggtaatagtttttccgtaaaagcaattcttccagctaatcaggcatctagcgtgacatattttgatttacaaatggaacctaagcagaagcaaaaattagatgtcgaaattaccaatcaaagtaaagaacaaatgactattaattgcgtcgccaacacagctattaccaatgagatggggtacgtcgattactcgataccaaaaacaaaaccggatgaaacgctcaaatatccatttgctgatataacagaagtaagtgactccgagattacacttgaacctaatgaaactaaaatctggtcggtaaatatccaaatgcctgaagaaagctatgatggaattattttaggcgggttacattttaaagaaaagactaaagaaaaaacagagaaagaaacaaagcaagaaaaagaagttcaaattaaaaatgaatatgcttatgtaattggtgtaaagttaaccgaaaaaaccactatagttaagccggaactagcattaaatcaaattaaagcaggaagtaggaactaccgaaatgtagtcgaagtaaacttgcaaaatacaaaagcgaccttagttggtggactggccgtggatgccaaaatatataaacaaggcagcgaaaaagtgctacatgaagcaaaacgaacggacttatcaatggcaccaaattccaattttaattacagtgtggactgggaaaaccaagagttaaaaccaggaaagtataaacttcatttagtcgccaaaaataaagacgataaatgggaatggacgaaggattttacaatctcatcagatgaagctaaaaaagcaaatgacaaagctttaggactggagaaagattacacttggttgtacatcacaggtggaattctactcttactaattctgattactgtcacttatttaattggaagacgtactgcaaagaaaaaagatgatgaagaataaatgtataaaaagcttgaaaacgaggaactcacttgttttcaagctttttttgtgcttgtaatttggattgaaatatcgctgtgtttttatgaaaaaatcaagtgtctaatgtgagaatgaatcaaggggacttttaactagttgtgacaaattaacgaacgtcttttgtatgaatttcaggaggattaaaaaaatttttaaaaagaaaaaacaaaaaaagtgctaaattccttctctatagagaaaataattcagtttgtgcatggtaatataagtttagttctcgccaagactaacatgtgtcgctaaataaattatataaatacagaggagtgaatttttttagtggaggaattatttacatacaaagaatttatcaacatgatgcaaaagcatgggataaaacacagaaaacgtaaattcaaacacggcgaaaagattacaagcgagtcttctaaactagatagtgttattttactaattgagggatatatcagtagctatactcgggaatcacctcagaaattactatctatttttgaacctggaatttttcttagatattgtattttggaagaatctcccccaactacagagcacattgtattatcagaaacttgtgagatttatgaatataagaagcaagatgttgaatatgcgctcacgttatttccggaaaattttggttttcagtatttctttttaaaaagatttgaacgccacttattttatagatctttactaaacaataaggcgcacaaggataagctttactatgcaataaaatacttgggtgaacttatcggaagcaaggatgcacaaggaaatattaccttaccgtccgaaataaccttaaaagccttaattgaatatagtactttatcgaaagccgcattttaccggcaaagagtgtctttactagagaagaatattttgaaaaggaaccggaagacattcatcgtgcaagatggaattatggccgaattattatgaaatctaactaacgagaaggagacagaagatgaaactgaactggaagccactgttgctttttatattattattagcgctttgttctcctgtgtattcattcgcggaagaaacaagagaagcactagcaccgaaaactactgaaacgccagaattaacaaaaacgaacgacaacttaaataaaacaatcttaacccctgaaaaaaaacaagcaaacaataattcagaaaccgaaaataaaaccaaagaaagtcaaacaaataaaaaagcgcagaccccacttaaaaacctaaaaaatacccttcccccgattccgcctaatagcaaaatttcggatatttttaaagacccggggatggctaatgcaatagctgaaaatttatcaacatacaataataaaaggagtgtggattctattgtaacagaagcagagttgaaatcaattacaagtttgtggtccgtaaactggggtgtttacgataagcccttaattaaatcaattgaaggaatccaatatcttactgagctggaaactatcctttttcaaaagaatgaaataacagatttgtctccgtttttgaaatcacctaatggatttccacgcttggttaatcttgtgttggagcatagtaaaataacagatccatctgtattaccaaaaataaaaatgcctttaatagagcacatcgctctcacgggcaaccaaattatcgacctgtctatcttaaaaaacattgctgatgattcaaaaccaaaacttagaagtgtaggtttacactcacaagagattgtgcttcctaaattaaccgtttctagcaaaaagcctttttcattaattagtatgaatattataggagattctatttataggagccgttcatattctccagctgcaacatttgacacttcaacttcaactattacttggtcgaaagaagtaatgatgaaaaaaccaaatataacatttacggagcgtgtatatccgccaaaggttacaactgtacctggcgtgcactactactggcgagataattcagtctcacttggaagaattagaatggacttctctggatatgtaaaacaactacttgagtacctcggtcctccaaaaataatttcatcgaaagacgttctatatgaagtaaatacgccgctaacggaaagcaaatttttagaagatgccaagattgttacagatcaggaaacaactattactactaactttaattcgataataaaaaatacttcagttgctggtgtctactttgtaacggccacagcgtctaatatagaaggcgaagtttctaaagatataaaggttgttattaagaataagcaaccagtcatcactgcaaaaagtgaatatacttatttagtaggtgaaaacgttgactcgaatcaatttcgacaagacatcaatgcgactttaactggcccagggagcgttcctaatgatttgaaagatgactttgcttcgaaggtggatttaaataaagcaggcgattatttcgtcgagctttccactcctgattggccaccgttaaccgatgctgctaaaccagtgacaattttagtacgtgtcagggaaggcttagagatgaaaatttcagatgattttcggatggacgtggatgaaaatactgaccccattcctatttctaataataagcaaactctaaaatgttttgctcaggagggagacgctgaaatagaagtacttgatagaagaagggcgaaacaaggatggactataactggaatgatgagcccttttaaaaacgagaaaggagacatattagaaacttctcttaagtatcaaaaagagtcatcagaaagtagtccgatatttttgaatgcgactaatcaaccaattgaaacgaaacaaccaactgaccaatctggagaaattacaactacttttaatttgcaaaataacttaactctagaagttctaccaaatgatgcattagtaacgggaatttatgaagctacggtcacatggactttagaggatgtacctagataaaaaaataaatagaaggagacttcgaagcgtgaaaaaatatattctaattgttataggttgtactgttttatttctttttccattagaaagtagcgcgtatacagatacagcaataagtaaggcaggtgtaacttttgtgagagataaaaaccgccctgcacaggtttttggaacagatgacaggagcggcacttttccttccaaaggtccaattaagcggcttcctaaaaccggagataatagtgatgtttactttattttactaggtgtaagcctccttttaattgccaaaaagaacttatttaagggggtgaagtaaaaaaagctaatcttaaataaacaataacataacagaaaaaggagaataataatgataagaaaaacaacaaaggtaatttcaacaagtttattagcactaggattaatcgtgacaccggtactttctgaagattttgcgtctgcagcaactaaagtcaataaagatacaaaaggaaccatcaaatttgataaaagcacaacaccaactcccgaaccaataactccagatccaactgaaacagacccagtagtaccaagtccagacaatccacccgtgagttcggacggattatggatacttgctatatccaactgggatttcggaactcaaagtgtatctgctttatcttctggagctttgaacattcatgccgaagatgacacgctttctacgtatacagatacaaatggcaatgggcagcaagacttaccaggagaagcatccgtatcaaaaaaagtgactccgtatgcacaaataagtgatttacgtggtactaatactggttggacgctttctgttacagctagtgagtttaaagatagttccacgccagctaaaaaaattcaaggtgctcagttaacgattccgaaatctactgtcgcaacagtcaattcgacagcgaaagcgccaactggttatgataatataactattccgatgacgggtctcagcacggttcctgtaatggcagccaaagataaacaaacagcgacaccgactaactttagtgatgacgaaggtatgggaacttggacagatagctttggttcagcagcaaaaaatgcaacacaaacaacaaaacctaaattatccattccacaaaataccgttattgaagatggaacttatcaaagtaagttaacttggacgttaagcgacacgccagcaatttaacattttttaaaagagaaaacttcatctttttatgttgttttctctttttaaattgaggaattaggaggaaatttagacttgaaaaaaatattcgctattgtctttgtatgtttttttacttttattttttttcacggtcaaacagtggcagcagcgaaagcggaagggaaattctctgtcaaagcaatcctgcctgagaaccaagcgtctggtgttacttattttgatttacaaatggctccagaagataaacaaactataaaagtagaactaatgaaccaaggaaaagaacaaatcacgattaaatgtgtggccaatacagctgttactaacgaaatggggtacgtagattattcgattccaaaagcaaaaacggataaaacattaaagtatccattttcagatatagtaaaagcgagtgaatcagaagtaacacttaaaccgaatgaaacaaaaatatggtctctcgatattaatatgccagcagagagttatgatggcattattttaggtgggctacatttccaagaaaagaaagatgaagaaaaggaaaaagatacctctaaaaaagaagtccaaattaaaaatgagtacgcctatgtaatcggagtgaagcttacagaaaaaacgacgatcgtaaagccgaacttggaattaaatgaaattaaaccggcatcgcgaaactaccgaaatgtagtcgaaataaacttgcaaaatacaaaagcgaccttagttggcgggatggccgtggatgcaaaaatatataaagacggtagcaagaaagtattgcgtgaatcaaaacgaaccgacctttctatggcaccaaactccaactttaattacagtgtggactgggaaaatcaagaattaaaacccggtaaatacaaagtggagttggtagctaaaacagccgatgataagtgggaatgggtaaaagaatttaccatttcagaggaagatgctaaaaaggctaataaggtggctctaggacttgagaaagactatacttggatgtatgtgactggcggtattttactcgtgctccttgtgatagcaacagcttattttattggaaaacgagctaggaaaaaagacgaggaatcacagtaaaaagcaaaataaaaaagcttgaaaacgagattcgattcttgttttcaagctttatttttatttttcgattttctccgtttctactacacgaagtcctttgcgttctaagtgagagatgatttcgtttttcttatcttcggttactccaactggtaaggaaaccagcacacgacgaatgaaatcttctgtttggttatcgagtgtaatcaaactcgcgatgctcgaataacggtcgatgattttagtgattttagttaaggcgccttgtacttcaccggttgcaatcgtaagtacataactagtagtttttacgttccagccgtcttgtaaaagaccaagtaatttaccatgcgtcaaaataccatagaaattaccttgttcgtttaaaacagcgatatatggtagttctttaattgtaaagaatacttcaaagaaagatgcattcacacaaatgtgtttcgttgcatttttgattaagctcattacaggatcgctcaggcttccaccatttgctgcatgtttgtaaatatgcattttataaatattacctaagaatttttcgcctttttcgtctagtacaggaacacagcgataaccagattcttctagtaaattgatagcctcttgtaaagtagcatctccaggaacggttgttaaatttattttagggatacaaaggttttttatcaacatgttattcactccattcttcttctctttcattttaacttaaagtaggtcttttgtatagaaaatcactgttaactcaattacgagaatgaaaatgtgtaatttttatcatatatataaggaaacttttgtataaaggtttaatttttcttgaaaaagtgtattattaactatgctatgtaaaattgtaaacagaaagaaggatatgaaaatgcaaaaagaaatcttgaattttgattattataatcctactcatattatttttggtaaagaccgttttgcagaattaaatgaagttattcctcaagataaaaaagtattgattttatacggcggcggtagtgtaaaaagatttggaacgcttgataaagtaaaagcagcccttaaatctagagaagttggtgaatttggtggtatcgaagccaaccctacctacgaaacgttaatcaaagcaattcaacttgtgaaagaagaaggctatgactttttactagctgttggtggcggttctgttattgatggtacgaaatttgtcgctgctggcgctttatttgaaggaaatccaatcgatatttttggcagcggaattggcgaaaaacgtccgattacagaagcgctaccttttggaacagtattaactcttccggcaacaggttctgaaatgaatagtggcggggttattacttttgttgaaaagaaagcaaaacttggctttggaagtgcatttacatacccagttttctccttacttgacccagagcttacctatactttgccaaaacgtcaactagcaaatggcattatggatgcgtatgtgcatgtgatggaacaatatatgacttatccagtaggagcgttacttcaagatcgctatgctgaaagtttattacaaacgttaattgaaattggtccagctgttattgaggaagataatcatgattacaatacgcgggcaactttcatgtggtcggctacgaatgcgctcaatggaacactatctcgcggcgtcccacaagattgggcaagccacagtttgggtcatgaaattactgcattatatggaatagatcatgcgcgtactttagcgattgtattaccatctcttttaaatgttcgtcgtgaggaaaaacatgagaaattagtacaatatgctgaacgtgtttggggaattacaaatggtactgatgatgaaaaaatagatgcagcaattgttaaaacacgtgagttctttgaaagtttaggcgcagggactagatttagcgattatggtcttggtgatgaagtagtagacttactagtggatcaattagagcgtcatggtttaacaagtatttctgaacgcggtgaccaaactttagaaatatctcgtaaaatctataccaatgctttatagtaataatttttaaatatgaaagaaggcgaattttcttgagtaccgagaaggaaaagacattttttggacatccgcgcggactcgctacgttatttaatacagaattttgggagcgattctcatactatggaatgcgcgcaatattaatatattatatgtattattctgtatctaaaggtggacttggttttagtcaatctacagccactgccattatgtctatttatggctcactcgtgtttatgtcgggtgttattggtggctggtttgctgatagagtgttaggaccgagacaaaccattttttatggtggcgtattaattatggtagggcatttagtactagcgattcctagtgggggagcagcagcgctatttgtttctatggcatttattattttaggaactggattacttaaaccaaacgtatctagtgttgttggggacttatacccagccggagacaatcgtcgtgatgctggctttagtattttctatatggggattaacttaggcgcatttatcgcaccaccgattgtttcgaatgtttcggaccatgccggaagcttccacgctggttttggagtagcagctgttgggatggcaatagcactcgttgtttacgttttgacaggaaaacgatacttaaaagaagcaggcaaaaaagcaccaaatccacttcaaaaatcagaagctaaaatccttacgatgaaaattatcggtattattttagcaatcggattattaattgctgtgttaacacttattacaggtagtttaacaattaatacaattatccttgctgtaacagtaatgggagttggagtgccgctagcttactttattatgatgatgacaagcaagaaaacagaggcggacgagagatcacgcttaactgcatacataccattatttttaatcgcagtattattttggatgattgaagaacaaggatcaaccactttagcgctatttgcagcagaaagaacggatttatctatttggggtttcaatttaaacccagcgaatttccaatcacttaatcccgtatttgtaattaccttatcgcctatctttgcatggatttggacgaaacttggtgatagacaaccatctacaccacggaaatttgctttaggactattctttgctggtttatcatttgttgtaatgatgcttcctggtattttacatggaaatacgactacacttgtaagcccgctttggctagtattaagtttcttcatctgtattttcggggaaatgtttatctctccagtaggactatccgcgacaaccaaactagcaccaaaagcttttgcgtctcaaacaatgagcttatggttcttgtcagatgcgatgggacaagcttttaacgcacaagtaacgcaattctttaatgctgacactgaaattgcttactttggaattactggttttgtcgcaataggctttgcgatagcattattcattttcgcgccattcttgaaaaaatatatgaagggcgttcattaaaggatttaaagacactttctctttgtttagaggaagtgttttttgtatgcggaaaataaattagtttgccattaactcttaagattgctactattaaagggagaagtgataatttaaaggagtgtatacatggaatcatcaagcagggtagttatctatttaacgcgacatggaaagacgattttaaacacacttgatcgggtgcaaggctgggctgactcgccgcttaccgaagaaggagcacttgttgcgcatgatttaggtcgtggtttaaaagggactaattttgtagccgcttacgcaagtgaccgcggacgtgccattgaaacagctcgaattgtaatgaaagaaagcgacaaccatcatttaaaactcgaaaaattagctgaaatgcgcgagtttggtttcggtaaatttgaaggagaatataaccaaactgtgttaaaaatggttgcgaaggctcacggctttgagtcaatcgaaaattattatgataaaacttctgaaaacaattctaatatcgtgattgacacggtgcataaaatggatgaaacaggcatgacagaaaactcggccatttttgaaaaacgattgactgccggactggatgcgattcttcaggatgcgcaaactcgtggtggtggagaggtccttgttgttgcgcatggtatggttattcaccgcattattgaaatgattgatccaagtaaaaatttaagaactatcgaaaatgctagtgtgacaaaagtgatttttgaggacggtgtttattcaattgaagaacctggaaatatgtcttatgtagaagccggaaaaaaagcgcaagggggagtttaagtgaaaacaggaaaactaaatgtgtacttagttagacacggtaagacgatgtttaatacatctcgtcgcgtgcaaggttggtcagatacaccgctcacaaatgaaggcatagaagtggcagaatttttaggacgcgggttaagagaaattccttttgatgctgtttatacaagtgaccgcggtcggacgattgaaacggctggaatagttttacgagaaagcaaacaaacccatttggaattaaatgagttgagcgatttccgtgaattcggttttggtaaatttgaaggggagtatgaagacattatgttcggaaaagtaatcgagcatcttggttttcagtcagtggaagaagcttttgaaaaattcggctatgatggctatcaaatcatttccgaaacagttgaaaaaattgatgaaactggaatgtccgaaaaatgggactccatggtaactcgtttgaaaaatgctttggaaacagttgctaaagaaaatcaatctgaaaatgcaaatgtattagttgtttcgcatggaatggcgattaatacgattatttctttctttgatataacgcaaattaacccagaattagcaaatgcaagtgttacaagacttggatttgaaaatggtgaatggacgatcgaagcagttaatgatttaagctatattgaagcaggaaagttagtcttagcataaaaaaatccagagtggcgcaatacgctactctggatttttaaattattttacgaatttaatacaaactggttctggaacttttacatctttttgaagtaatgtaagagcgccagtttctttattaacaccaaaaacagtaacgttattgctgttttcgtttgttgcaactaaaatgtcgccagtatagttaaggtcaaagtcacgaggaccaacgccttctactggtgttgttgctgcaagtgttaaagtaccgttttctgcaacagcatagctaacgatagcatcttgaccgcggttagaaacatagaggaaacgaccatctggagaaatatgaatggcgctacctttattttctttgtcaaatccttctggaagagaagcgattgtttggataacgtttaatttaccagttgcgttatcatattcagcaaaaataacttcggaagttaattctgtcatgatatacacatatttagcatttgggtggaaaacaaggttacgaggaccgcttccaggttttacttctaattcagttgctttttcaagtttaccagaattagcggagtaagtagttactttgtccgttccaaggtcacatgtgataacatatttttggtctggagtgaatccagcaaagtgagcatgaggtttttcttgacgttcgtgaacacttttaccagtatgttgaatcgttgcaacagatggttttaaagcgccgttttctgttgggtaacttacgattgtgcctaggtgatagttagcagaaacaacgatagaaccatcttctgaagcatctacataacacggcgggttacctgtttgaacatcttggttaatgaaagcaagagagccatcttcttcaattgaaaaagctgcaactccacctttatcgccatcttttgctacagagtaaacgaatttttcgtcatctgaaattttaagatatgttgggttatccatttttccggctaatttattttctttaatttcaccagtagttttgtcgattactaagcgatagatcccttggctttcgactttggtgtatgtaccaatatacgcagttgcttcattatttgacatgcctattcctcctatatataagatattcctagtcaattatagcatagtaaagaaaagatagaaaaacatcacgtttattgcatttttattacttttcataaagttaaccatattttagacttttatgaaatatttttgtaataaaagtattgacttagaaacaaaagtaatgtaagatatacttatcccatagagattgtcatttgaaataagctagttaagaataaatcacttcccccatagaaatgttcttaacagcttattgcaaataaacactccttttaagatagttgtagcacagaatttcccaggttctgtgctataattatattttagtagagatgccagagaagaggcgctctttttttatgccatctgggagagaggggaagaaatgtctattcaaacaatttttggaaatgaattatataactggattaacattaatacagataaagctaacaacttagaagatatttatgctacatatgatattgatgaggaggtcattgcttattctttagatagaaatgaacgagctcattttgagtatgaccaaaaaacagatactttcgtagtagtatttaatgtacctgaccaaagaaaaatcgataatcactatgaaacaattccaatggtttacattattaaagataaacagttactaacgattacaaataaaaacaaccaatatattgtaaaaaaaatgaataaatacttaaaagagaatgaagatgtgactattttacaatttttatttagtagtttatatcttgttatggattcgttttttccgtatgtggaagagatggatattgatcgtaaaacaattaatgataagctgaaaatcaaaacgacgaagaaaaatttactttctttatctgatttagaaacgggcatcgtgtactttttgtcagcttctaagcaaaatgccgctttattagagcaaatgaaaacacatgtaatctttcgaacgttaaatgaagtggaaaaagagcagtttgaggacgcactaattgaagctagacaactggttgaaatgacagaactaagctcgcaaatattacagcaactgtcgggtacgtataataacatcttaaataataatttgaatgatacgatgaaaatacttaccgcgttgtctattttgcttacagtgccaacgattatcactgggttttttggaatgaatatgccacttccattagaacataatgcatttggatggattgttgcaatttttattagcattttactgtggtttggactttcttttatattgcgaaaattgatgagataacataaaaaaccctgctttcacactgaaagcagggtttttctatttaaataattccgtgagcaatcattgtatctgcaacttttaggaaacctgcgatattggaaccgacaactaaattaccaggcgccccatattcgcttgcagcattgcttgagtttttataaatgtctttcataatgttttgtaagtgttcatctactgtttggaaagtccagctcatacgtgtgctgttttgagccatttcgagtgctgatactgcaactccaccggcattagctgcttttgctgggccaaataatactttgttttcgtgataaatgtcaaccgcttcaagcgtagatggcatatttgcaccttctgcaactgcgattacaccgttttttacaagtgcacgagcttggtcggcatttatttcattttgagtagcgcatggtaaggcaatatcacatggaacagaccacacatcgccgcctgcataatattcagcagatggatgcaatgttacatattcactgatacgtttacgctctacttcttttaattgtttcactgtttctactttgatgccttctttgtcataaacaaatccagcagaatcactacatgcaactactttagcgccaagttcatgtgctttttcaattgcataaatagctacattaccagaacctgaaacaacaatcttcttaccgcgaatggattcaccagctgcttctaacatttcaaccgtgaaataaacaagaccataaccagttgcctctgtacgagctaaactaccaccgtatgatagacctttaccagttaaagtaccagcatcataagcgccacgaagacgtttgtattgaccaaataagtaaccaatttcacggccgccaacaccaatatcaccagctggaacatcagtatctggaccgatatgtttttgtaattctgtcataaagctttgacaaaaacgcattacttcagcgtctgatttaccttttggattgaaatcagagccacctttaccgccaccaattggtaaaccggttaaagaatttttgaagatttgctcgaaaccaaggaattttacaatactcccggtaacggatggatggaagcgaaggccgcctttataagggccaattgcgctgttaaattgaacgcggtaaccacgatttacttgtactgtgccagcatcatctacccatggaactcggaaactaattaggcgttcgggttctgttagctgttctaaaataccgtgtgcttcgtatttaggttcttttgcaagggccgggataacagagtttaagaattcttcaactgcttggtggaattccgtttcgccaggattccgttgtttaattgtctcaaacacacgggctgcgtattcttcggctgccttagtgtcgttttggatagtagatgtttgtgccatactataatcgctccttgtttaaatattttgactataaggaaaagtagaaaacctgatacaaatacaagcgatgttataaaagagaaaaacatcggcttagttgcatcaattaggtcaacttttcttacctatgttgttagtttacacattgttgagaatattttcaagcataaaaaccaatttttcagaaattttttaaaatcaagttaatgagaacgtttgcttaagcaattaatgaaaaaattttcgggggaagggaagtttttaatgcgatttcttaactgccaagcgatgtcataaaaaataaccgcaccagggggatgcggttaaagggagtattagggagtaataacgttagagcgagccaagggataagactaattcggatactagaattattgctctaacattacttgctttcttttgggaaaaaataaaagccctccacgtaaacaagtatataaaatatgctctttaaaatcatgtgctttttcttacaatagtattctttaaggttacgaaaatgtcatgtttttataaatcgttaatttctttacgatcacttgttttgcttagctttccttctcggctttgaagttcttgtttaatatcttctaatggaatgtctttttcggctagaaggacgagtaagtggtatgttaggtcggttatttctgaaatgagctcttcattattgtttttggccgcgatgacgacctcagtagtttcttcgccgactttttttagaattttgtctaatcctttttcgaataggtagttggtgtaggagccttcttttggttgagttttgcgaagtttgatttcttcatataagtcactaagcatttaaaagtcctcctttataaggttgaaaaaacagctttttttgccggtatgacatgctgggccagtttgaatcacgcgaataagcaaagtgtcattatcacagtcggtccaaatttgctttactttttgggtgttcccactggtttcgcctttattccaaagttcatttctcgagcgtgaaaaaaaccaagtatagccagtttcaagtgttttttggtagctttcttgattcatgtaggcgagcattaaaacttcgccattttggtcatctaaaataatcgttgggactaatcctttagaaaaatcaacggtattcatgggcgaatgttcactcctttttcaagtaaagtagttttgacgtttttgatactaagttcaccgtaatggaaaatactggcagcgagtgcggcggttgcgtttgtttgttcaaaaacttctaccatatggctcgcattaccgcatcctcctgaagcgataactgggacggagacagcttcggaaattgcttttgtgagtggaatgtcatatccgtttttcgtaccatcaccgtccatgcttgttaacagaatctcaccggcgccaagttgagtcgcttttttggcccattcaatggcatctaaaccagtgtcatctcgtccacctcgagtgaaaacatgccaattggagccgttccatttagcgtcaattgcgactacaatgcattggtttccaaatttgttagcaccttcttggataagttcgggtctttttattgcggcggaattaagcgatattttgtctgctcctgcttgaagtaattctttcatatcgttcacgctatttatacctccaccaactgtcagtggaataaaaacttgttctgccgttcgttccacaacatctatcatcgtttggcgtagttcaacagttgcagtaatatcgaggaaaacaagttcatcggctccagcttcattataagctttggcaatttcgactggatcacctacatcggttaatgaaacaaaattaactcctttaactacgcgtccagctgtaacatcaaggcatgggatgattcgtttagtaagcactttgttccacctccactatgtctgacatcgaaatatttccgttgtaaagggcttttccagcaattgctccgtataatccgagttcactaagggcttctaaatcagcgcgactgctaacgccaccagaggcaattaaattgattgtaacgtgtttttgaagtgcggccatctgttctaaattcggaccagttagcgtgccatcgcggctaatatctgtataaataatggtttcaacatccatcgcttccatttgtttggctaaatctaaaaagcttacttgactgatatttaaccaaccactcgtcgcaacaaagccgttttttgcatcgatgccagctgcgattttagagccgtattttttcactgctgcctgtaaaaagtctgggtctgttagtgcagctgaaccgataataactcggtcaataccggactgaaggtaataatcaatttgcgccatactacgaataccgccaccaacttggaccggcacctttgcagcttttttcatttgttggataatttctagattaacgggacgaccttctaaagctccgtctaaatcaacaatgtgcaaataggtggcgccacttttagcaaatgatttagcttgggcaatcggatcttcatttacaattatttttttggaaaaatcaccttggaaaagtcggacgcattgtccattttttaaatctattgctgggaagatttgcatgattcagtgacctccttaaacccttttaaaatttcaagcccgatttgaccgcttttttctgggtgaaactgggcgccgtaaatattgcctttatttatcatacttggaacttcaacagaataaccgctagttgcaataatgtattcgtttggacaatttgcatagtaggaatggacgtaatagacatattcaccgccgagttttttagtgagtggggtgctgcgttttatttcaagttgattccagcccatgtgcggaacggcaaatccaggttcgtctggtagtttttcgacatgtcctggaatgagaccgagtcctttagtaaagagatgttcgtcacttgattcaagtagcagttgcataccaagacaaacaccgagcatcggtttgccagattctgccatttcttttaacgtcacatccagaccgcgccgacctagttcctgcatcgcttctgggaaagctccgactccaggtaaaataacgccatccgcttgcaaaatttccgcgtggttgctagaaattttattttgaagaccaataaaatcaagtgctttgctgatgctcttcgtgtttcctgtatcataatcaataataacaatcatttacaggactcctttagtagaatttacaccttttatttcagggtttattgtgattgcttcgcgaagagcacgaccaaatgctttaaaaagtgcttcaattttatgatgtgtatttttaccataaaggacgcgaagatgaaggttcatttctgtgttaaaggcaactgcttggaaaaattcttctactaactcagtgtcaaaatcgccaagcttaggatttgttaattcggcgtcaaacacaagataggagcgaccgcttaaatcaagtgcgcaaaagccaagtgattcgtccattggcacataggaagagccgtaacggttaatactggctttatcagaaagcgcttcttttaaacaaagacccagtgtaatgccgacgtcttcaactgtatgatgtgcatcaacatatgtatcgccgtctgcttttacatttaaagtaattcggctatgtttggaaaataacgttagcatatggtctaaaaagccgacaccagttgatatagtagaatccgcttgtgaatctaggttaattgacagttcaatagaagtttctccggtaatccttgttttacttgctgatctcatttaattttcctcctcaaaacgaatttggatggctttggcgtgggcatctagaccttctttacttgcaaggagcacgatagcatctttttcttttgcaagagcttcttttgtataagaaataaaagctgaacgtttcgtaaaatcttctacgccaagaggagagaagaatttggcggttccgcttgttggtaagacgtggttcggtccggcaaaataatcgccaagtggttcagatgcatagtttcctaagaaaatggagccggcgtttttaatttggtaaaggtagttcattgggttttcaagttgtacttctagatgttctggagcgatttcgttcattatatggaacatttccgcagtgctctttgtgataataatttttccgtgggactcggtagcttctttagcaatcgcttttcgaggtagattttcaagttgtttatttagctcgatttttgtttgttgggcaattttttcactggttgtaattaaaatagcacgggctaatgtatcgtgctctgcttgagaaagtaagtcggctgcgataaaggcgggtttagctgtttcatcagcgagcacgacgatttcagatggaccagcaatcatgtcaatatcgactaagccaaacacttcacgcttagcagtagccacataaacattcccaggtccgacgattttgtctactttaggaatggatgctgtaccgtaagctagggcagcgattccgtgcgcaccgccaacttgataaatttcatcgacgcctgccaaatttgcggctgctaaaacatgtgggttaataccgttttcgctaggtggtgtaatcatcacaattcgttttacaccggcaattttggcagggaggacgttcattaaaacagaggacggataggctgctgtaccgcctggaacataaacgccaactgtttctagtgggcgaattatttgtccgcgaatgacaccatctttttcactatctaagaaagctgattgtttttgtttattatgaaagctttcaatgtttgcttttgcttctttaagagcttcaagaaaggcgggatcgactttgttggtggctatttggatgtcgctgtttgggatgcgcagttcatttagttcaacaccatcgaactttgccgtatagtcgaacaaagcttggtcaccagtgtttttaacgttttcaataattgcttttacttcgcttgcgatttggtcggagctattactagaattttccgctctcagttcgtttagtattgcctccgttgttcctgttaaagttttcatcgcgtctgctcctcctttatcgcttgttctaattgatcaattaattggaaaatttgtgttttattttgttttaaggaagctttattaacaatcagtcgggcggagataggatacattttttcataaataactaagccgttttcttttaaagtggagccggtttcgacaatatcaatgatagcatcagcgagtccaagtacaggagcaatttcgaccgagccttcgattttgatgatttcgacatcttcgccttttgcacggaaaaatttagaagaaacagctgggtatttggttgcgataattttccggcggtagctacttggatcaaaatcaggagtagaagctaggcaaaactgacattgaccgatttcaagatcgagcatttcgtaatgtgatttggaggcttccattagaacgtctttaccaacaatgccaatatccgcaacgccgtgttttacataggtcataacgtcaacagcttttactaaaataaaagaaattggttgggtgctactatggaaaatcagttttcgctttttatcattcatagaagaacaatcaatacccgctttttctaaaagtgcgaccgcgtctttctcgagtcgaccttttgttaaggcgatttttaaagctttcattattccgcctccttatgaaaaatagtttggatactatcgcgcgcaacgtgaacgacagttggaatttgccattttttcgcaaaagagatggcgtttattggagtttcaaaaaaacttaattcgctgttcggtgtttcttgcatgagtttttctgcttgttggattgcatctaggtcgtagtggattaaaagcgttgttggcgtttgttttttgatgatgccagcacggttttgtagggttgtgagggagtcgagattaagagctaaaccaactgctggagaggaagagctggtgaattgttctagtaagtgatcgtaacgaccgccacttaaaaaattatcagcagcaaggtcggcatatcctctaaaaataataccagtataataatgaaaatcttgcacgagtcctaaatcgacactaatatctgctgcgtaagaaacagcgtccacgatagtttccatttcagttagtgctgtcaaaattcctttatcggtcgttaaatttttagcttgttttaaaatagtcgttgctgggccaaataagcgtggtaaggcgagaataaaatcatcgagcgtacttggattctcggtaacaaattgttgaatgccagtgagacttttattttgaatcaggagacgaaaatccatttcagcagtttcaggtaggtttaaaagatggattacacgtctataaatcgccgcatgaccaagttcaatttgaaaattcgggatttctagagcatttaaaaccccaatcccacttaaaatacattcaatttctgctttgatggaaggatagccaatgatttcaattccggcttgtgtttgttcgttttgttcgccgccaaagtcttcatttgcacgaaagatttttccgctataagaaagttttagagggagtgtaacaccagttgtactaacgactcgaccaattggaagggtcatatctggcctaagtaccgtcaagcgacctttttcatcaaagaagcgatatagtttggcatcagcttgatgttcagaggaaaaaacatcttcaaattcgataacaggtgtttcaatacgcttaaatccacgtttcgcaaaataatgattcacttgttgctcaatctggtatgaggcccgtgcttcgcgaaagagcttatcacgagttccagttggcaagttcttgtttaagttcatctggttagctcctttacaatattttagtttattagcatattagcacgttaaagtgtttttgtaaatgatgaaaagaaaaattgtttcatatggtataattagtgtaccatttagagtacttagggaaaagaattttgaaagagggttgaatatgaaaagagacgggcatacgcataccgaattttgtccacatggtacgcatgatgatgtggaagaaatgattttaaaagcgattgaactagattttgatgagtattctatagttgagcacgcgccgctttcgagtgaatttatgaaaaatactgcgggaaatcaagaagcagttacaacggcaagtatgtcgatgagtgatttgccttattattttaagaaaatgaaccagatgaagaaaaaatatgcgagcgatttattaatacatattggttttgaggtggattatttaattggttatgaggatttcacgcgagattttttgaatgagtatggaccgcaaacggacgatggtgtgttatcgctgcattttttagaaggccaaggtggctttcgttcgattgattttacagcggaagattataatgaaggaattgtacaattttatggtggatttgaacaagcgcaacttgtttatttagcaggtgtcaaacagtcaattgaagcggatttaggagcttttaaaccgcggagaatcggacatatttcgctgtgtcagaagtttcaacagttttttggtgcagacgggcgtgattttacagcggaagttatcgcagaatttgaggcgattcttgctttagtgaaaaaacggggttacgagcttgattttaatacggcggggttatttaagccactttgcaaagaaacctatccaccgaaagaaattgtgactttagctcgagcgttagagattccatttgtgtacggatccgattcacacggtgttgctgatattggtcgtggctacaacacttattgccaaaaatgatctttcattttgacatgtccgttttctttaaatgtaactccttctgacagtaatagctcacgctgttcttcccagttcgggacaagtcgcccagctgcatttacgacccgatggcatggtgtgatttggtcacgctttgaatgcttcagtgtagcaccaactagtctggcgttttttggaaagccaatcatataggcgatttgaccatatgtagtcactttgccgcgtggaatttggcgtacgaccgtataaacacgttcttcaaaatctgctggaaccattacatacctccgtttgttcataataaatttagtatacaggaaatagttattttataaaagttaggatgattagtaaatgccagatttttcttacgcaaaaattacgaaactcgtggtccattttgctggaaataaagcgagagaagaaggaacagaagtatcagcaaatgtgcttcaagatattggctcagaaatgaaccaaaccttggcttctattttcttagagccatttacgaaagacgattattatcaattttctcatgaaacagatttggattttaatgaggtccggacttttgcggcaaatatgtttggggcggaagaagagtttttagatgaatctaagaaaattttagagcatttatatagtgaaacaacccacccgaatattaaaagtggtgatgtatggattttctttattgagggttgcgtagttgatggagattttacgaatggtattggcatcttcaaagttgaaaataaagaagtttttctgaaaaatgattttaatggtagcgagttccagattggttatgataaaggtattacaggaacggacctcgataaaggttgtttgatttttaatgtcgaccatgattcagggaataaagttttgatattagatcggcttaaccgcggggattctgtttattggaaagataagtttttaagtattgataaaataacagatgaaaaattttatacagaaggatttgtggaagtttgcacggactatattaaacaacgggaagagtcgctgcttgataaatcgaattttgtgaaagcgacgagcgaatatttggcaggggaagaaacgttaaatatcgctgaatttgctcgtacgacaattgaaaaaccggaagaaattaccgaattcaatacaatggtagatactttcgaacgagaaaacaatgtccgttttccggaaacattccaattagatgaagaaaaacgtgaaaaactatcgaaaaaaattcgcaaaacaattaaacttggaaaaaatatttcagttgtcgtgaaagacttagaacaattggaagaaactgattttgtccaaggctatgacgaggaaaaaggaaaaaactacatgattgtttattacgattaaaagaaaaaccggggattccgcatccccggtttttttgctgtctaaacgacaaacataaagtacagtataaatagaaccatcatcacatacataattggatgcacttctttataacgacctttaagtaccattgtaattgggtagaaaatgaaaccaatcgcgataccagttgcaatagagaaagtaagtaccatcattaagataacgaaaaacgatggaacagctacttcaaatttagtccaatcaatatgagcgacattgccaatcattaaaatccctacgatcacaagcgctggagtcgtaaccgcacttgtaatgacaccaagaagcggcgagaagaatagtgacagtgagaaacagatagcaataacgacagctgttaaacctgttcgaccaccaaccgcaacaccggcagttgattctacataagaagtagttgttgatgttccgaaaatcgctccaaaaactgttgccagcgaatcggaaaacagcgaacgacctgcgcgcgggattttattatcttttacaaacccagcttgagtcgcaaccgcaacaagtgtccccgcagtatcaaagaaatcaataaagaaaaatgtcaaaataacaatgagcatttgtggtgtgaaaatatctggtaagtgaataattgcttgaccaaacgttgactccatacttggtacagaagaaacaacttgagttggcacgtcaattaatccaaataacattccagcaatggcagtagttgccatcccaaagaaaatcgcacctttccaaccaattgtcatataagctacagttataataatcccaaaaacagcaagtaacaccggaccagaatgtaagtcaccaagtgctacaatcgtcgaatcatttggtacgataattccagcattttttagtcctaaaaaggcgatgaaaaagccaattccagctccaacggcaaattttagttcagttggaattgcattaacaattttttcgcgtagtcctgaaagtgttaaacaaataaatactagaccagaaacaagtacgccagctagtgcagtttgccacgggataccccactgcgcacaaaccgtataagcaaaaaacgcatttaatcccataccaggagcgagcccgattgggtaattagcgataagtcccattgcaagggaaccaacgactgacgcaagaatagttgctacaaaaacagcttttaattccattccagtagttgcaagcatagatgggttgacgaaaagtacataagccatagacagaaaagtcgttagccccgcgagtatttctgttcgaacagtcgtcttgttctcgcgtagtttgaaaagtttatccattaaaaaaagcctccctatttatgttgtcgcacataacggaaagagcctaggtaaaaaagggaataataaataaaaatagcaaaaaaatccctattaaattttacaatagctcgtagcctggcattttacggttgcctggtagaaacgaacggtccatattaccgaacttatacgactttattattgtagacgattagccgatttttggcaatacatgaatgaaataaaaataaaaaacaaacttttacataaataagtttatacttttaaaaaaataaggtataataaaatcaaataatagttggaggtaaaaaaatgacttataaatttccggataatttttggtggggaagtgcagcatcaggcccacaaacagaaggcgcagcaaatgtagatggcagaaaaccaagtatttgggatcactggtacaaaatcgaaccaggtcgtttctttaacgatgtagggcctacgaatacatctaatttttactatcaatataaagaagatattgctttaatgaaacaaactgggcataattctttccgtacttcgattcagtggtcacgccttattccagatggtattggcgaagtgaatccaaaagcggttgatttttacaatcgtgttattgatgaaatgcttgcaaataatgttgaaccatttatgaatttatatcattttgatatgccaatgtcgatgcaagaaaaaggaggtttcgaaagccgtgaagtagttgatgcatatgctacttttgcaaaaacttgttttgaattatttggagaccgtgtgaaacattggtttacttttaatgaaccaattgttcctgttgaagcaggttacttatacgatatgcactatccgaatgtcgttgattttaaacgcgcgacacaagtggggtaccatactactttagctcatgcgcttgctgtgaaggaattccacgcacttgaaattccagaaggccaaatcggtattattttaaacttaacaccgtcatatccaagaagccaaaatccagctgatttaaaagcggctcatattgcggatctaattttcaaccgtagtttccttgacccagtaacaaaaggggaattcccggctgaccttgtagaaattattcgcgaacatgacgcgcttccagaatatacggaagaagatttggcgataattaaaaacaacattattgatattcttggtgtaaactactatcaaccgcgtcgtgtgaaagcgaaagaatacgcagcccacccggatgcgccatttatgccagaacatctctttgataattatgaaatgccttaccgcaaaatgaatccatatcgtggttgggaaattttcgaaagagcgatttatgatattgcgattaatctgcgcgataactacgataatattccattcttcatttctgaaaatggtatgggtgtagaaggcgaaagtcgctaccgtaatgcagatggaatgattgaagacacgtaccgaatcgatttcattaagagtcacttgaaatggctgcataaagcaattgaagaaggttctaactgtcatggttatcatctttggacattcatggattgctggagctgggcgaatgcttacaaaaatcgttatggcttagtagaagtagatttggacaatgatttcaaacgtaccgtaaaagcatccggtcattggtacaaagaactttcagaaaacaatggttttgaagactaaatgtgataaaataaaagtattatgtgtaaagaggtgaacttccgtggctcagaaccagacaaaatatagctttattgctgaagaaatccgcaaaagaattatgaatcacgcctatccgcttaatcaacctattcctgatgagataactttggcgaaagagtttgattgtagtcgaatgacaatgaaaaaggcgcttgaagtacttgtacttgaaggcttactatatcgtaaacgcgggcatggtactttcattatcaaatcggcgctggacgcggaccgtttgcagattcataaccaagaagtaaatggtttcactaaacttttagacggaaaaaaggtcattagcaaagtaattgagtttaaagtcatctttccaacagaagaaattgcggaacgtcttcatatcgaaatggaaacgccaatctatgatattcttcgtgttcggctagtgaaagatgaaccgtatgtgctagaacatacgtatatgccggttggggttatcccaggcattaaccagcaaattttagaaggttcgatttactcatatattcaagacgatttgaacctaaaaattgctagttcgtacaaacaaattcgcgcggataaagcgacactgcttgatcagcaatatctcgactgcgcttctgatgaccccgttgtcgaagtagaacaaaccgtttatttaaacaacggtctcgcgtttgagttttccagatcgcgtcaccgttatgataaattcgtgtttactaccgttaatattgctagacgttgaaaagacgctagacaaagtgagcaatcattttgtctagcgtcttttttgaatatctaagcagtttaagttcaattctatacaaaagaatgggtttgttcacaaaatagacatatttacacgattgataataatttaggattcttgtataatatttagcccaattacgcacaaattttaaatatagttctaccgtttaggctatacggaactgtggaaagaaataatattactcctagtataagattatttaaatagtttaaagaaatcatttttgttcacaaaattgacacatttcacctcgttgataatgttttttgcctaatatataattgttgagctcaattaagtacaagattagtactccttttgataggagtgtgagcagttaaaatgagaaattagttatatgaggagggatagtactatgaagaaaaaatactttctttgcgtattcgcagtaatattatttttcacaggttttctttttggaaattcaccggtgaatgctgctgaaactgatacaagcaatgtgacgtataattacattgatatcagcacattaacagaaacgcaaaaaaatagtattatcaaaggaaatccaaacgagacacttacaaatgattatgaaaattattcctttgtgtatcaaaaaaacacatcagaaccaactacaaatacagataatacttctgacaataataaaaatcaaaatgggacactattaaaagcgggagatgttggcccaaatagttatttaatcatcctagggtttattttattcggaagtggtattggacttcttacattgaaaaaaagacacgccagacagctgctagtatttcttgttgtccttggcggtagtagtttgttagttgggtcgattgtccaagcaacagaaaatagtaacttaaaaactcaagaatctcaaacagttgcaaaaggaacgaaagaaacgaaacaacccgaatcaatggaagggtatacgtatgtaggatatatacacacaagtaaaaataatacaccgcccgtagttgaaaaagggactgtaactgtaaactatcaggatgaacaaggaaattcactggcgactagtgaaacactcgaaggcgacattgaccaaccatatcagactgcaacgaaaaatattgagggataccaattaaaagaagtgaacgggaatacaacaggaacttttacagaaaaagcgcaagttgttacttatgtttatcaaaaagtgcctgtagctaccgtaactgttaaatacctcgatcaagatggaaacaaaatccatgatccacaaacaattagcggtaatattggcgaaccatatgatgcttcaacagataaatacaaattacgaattgagggatacacattagatacaacgaaactgccaaacaatgcaaatggtactttcactaatcaagctatagaagtaacgtatatctatacgaaagaagcgcaagatgttaaaataacaattaaatttgttgatagcaatggggatccatttgttttaacggatttaacaacttataaaaacggcgatttagtacctatttatcctaatttagaccaatatcatatgagattaaattacaatcaagaaatttataatcaaggtgaagcggtgcctgatattgttattccagctaaagaaggggaaacatattcgttaccggaaagaatgacctttaatatactggatgatcaagggaaacaaatcccctacgttatttcgcaaaatgccgatctcagtagtaccgggattgagaggtgggaaaactacctaagtataccaaccaatcgcgaaggaacactgactagcgaagatgtggtggttacgtatcagatacttgtttatggggttatgattcctgagccataagtaaatcaaattattcgataataaaaaagcaatctcgtctagagattgcttttttaaatacgttctttacgtccacgaaatgccctaatactatgattgaatacttccgagagcattaatcccgctgctatagcgccagcaaccactgtaacttgtacagaaaaaccaattgcttccgtataatcacctaacacaaaattgcgcacagcttggtaagcgaggcccccgggaacgagtggcacaattccgggaacgttaaatatcgtaatcggcatttttttatgttttgcaaaaaagtgactcagaattgcgacgacgaaagcgccggcgagggaagacgcccctgttccagaatccatttgcatcaaagtccaataagccatccagccaaatgttcctgtaataccgcaagcattcagcgctctttttggcacatttgtaataatcgcaaacgtcaccgtcgcaacgtaactcagcactaattgaataataatagtccaaactaaatccattatagcgcctcctttataagaaaaagcggaaaacaaccgcgattccaattcctattgcacaagaagtaagtagcgcttccgttccgcgtgccattccactaagcaaatgcccagcaatcaaatctcgaaccgcattcgtaatcggcaccccgggaacaagcggcatcacgccaccaataatcatcgtatctaaattaattccccaaccaatcgaaatcgtcaaaacagctaaaagcccaacactcaatgaagctaaaaattccgcgagaaactttaccttcataaaaatctgcgtatagtaaaaaatgataaaaccaatcgcaccaatgatacaagttggaataaaatcaaaccaaccaccgccaaaaataaccatcaacgatccactaacaagtgaggcagcaataatttgcaaccaaatagggaagtagcgaacatctttatctaaattaacgagttttgtatgtaattcttttaaggaaattctcttttcagcgaaatccctggaaaattcattgaccatagatactttttctaaattaattgttcgtgttgggatttgctgtaattgtacattacgctcaccttcaagtgacataaaaagcccagttggcgtcacgaaactaatcccttttttattactagcgatggtggcgatgcggttcatagtatcttccacacgatacatttctgcaccactttccatcattattttaccggccatcaaacatgtttccagtaaataatctgttgtttcattcgacataactaagcacctccaaccctttagtacttctcaatcgtaacgcaatcaatccaaaaattctagtaggaagggcgctttttttgaattcacgattgtttcaatgtaatttggggtaaatatttgatagtatggtagatatagattcggaaaggataaggattattttggcaaatattgaatatgaaatcatagaagaaataggcgtattatccgaaaatgcacgtggttggcggaaggaattaaacaaagtaagctggaacggtcgtccgcctaaatatgacatccgcgactggtcagaggatcatgaaaaaatgggaaaagggattacactaactgatgaagaggcagaagcactaaaaaaactgttagattaagggctggtgtaaagaaatgaaaatgtatgcgtatgatatttatgagccaattgggagaaaagatggggagatttttccagtgatattcgcacttcacggttttggtggagacgaacttgatatggcgggccgattagaattattaatggaccgctttgtagtagtttctatgcgtggtgatgtggaatatggaccaacttatggattttatcatatggtaacagagggcgatccaaatgcgcgtgaggttgattatacaagcttacgggtagcagaatttatcgatgaggtttgtaatgattatgtctccattgataaaaatcaaatcttccttgttggatttgatcaaggagccgttttaacaatctctataatgcaaagttatggagggcaatataaagctgctgcgctacttagtggtcgtttgccacattatttggaagaaagacccgctaatttaatgctaaaagataaacgtatttttatcggtcatggcattgaggatgcagttattcaaatagccgaagcagaagaaattgctcagtttttccagaaaatgggttgtaatgtagaaaaacatagttattttgtaggccataatgttaacgaagctgaagaagacgacttatacagctggtttgaaagtttcttgccaaaccaaaatcagccagtaaaaaaataataacaaaacagcgaccaagcaattggtcgctgttttttatttatccaaagtgaggaaaagaacttttaaataattcccttcaggaaagtttttatttactgtgaagtctgctggaagtgagtgcgtttcgacaattttataagtgcgatcgcttgtttgaaacgcttcggcaattagttttttaaatgctttcatcccaaatccggcgtagtttgtagaagcaataatggtgccatttggagcagtaatatcaataatttcacggagcatagctgggtaatcttttgcagcgcggaaggttacttttttagtgcgcgcaaagctcggtgggtcaacaacgactaaatcaaaagttagttttttccgtaaagcatatttaaaatagtgaaaaacatcttctacgataatatcctgagaatttggatctagtccatttacttctaactgttcttttgttttactaagtgaccgtccagcaacatccacactggtggttttactagcaccaccaaatagagctgctacggaaaacgctccagtataagaaaaagtgtttaggacgtttttggaaacagcatagtcttcacttattcttctccgtacgtctcgctgatcaagaaaaattccagtcatccaaccatcatctaaataagtagcatagttaatgccattttctttaataatcagcgggaaagtagctttttgaccagcgacaaaatcatcttttgtatcttcttggaaacgtcttttttcgtaaatacctttaacttctggaaaagataagaaaatctctaaaatcattttttggaaagagtatacgccgaggctataccactgaatcacaaggtagccgtcataaaagtcagcagtgaagccgccaaagccatcaccttcaccgttgaaaattcgaaaagctgtagttgaatcatctgcaaataaaaattgacgcttttcgatagctgctgtaattacagttgttaaaaagtgctcatcaagttgctgttgtttatcccaggtgaaaagccagccatcgcctttattttgttttccgtgatacccacgagctataaattgaccattcgtatctattaattctactaggtcgccttcctgtagatcttttggccatttttcgaaacgttcttttagaattaaaggatagccttctttatagccttttgtaaacttaggaaatagttttagttttatcgagtttttcatcatgcaccgtctttcattaagataaaatttccaacaaaaaacctgtgaagcgaacttcctgctccacaggttactttaaattattaattaattatacgcgaccgaatccaactaggaatttaccccagccagcgccgtggatattatcatacttaacgccattgtcttgcgcgttaatcatttgaccattaccaacgtaaataccaacgtgagaaattccgctaccatagtcaaagaatactaaatcaccaggttttgcttgtgattcggaaattcttgtagtgctagcgtattgtgcgccagaagtacgtggaagagaaattccagatttagcgaatacatatttagtgaaaccggagcaatcaaatgtagttggtccgttaccaccccaagagtaagcttttccaagatgtttttgagcttcagcgattaaagcacttgcgctcgcattgttagtggaaccttggtttgtgttagtattcgtgttcgtgttagtatttgtgtttgtgttttttgatggtgtgcttgcatttgtattgttgtttgttgtgtttgttttatttgtgttagtagacggagcaggagctggtttcgcagcttgagttggtgctttagtagttgtttgttgttccgttgcagtttcttttttctcagtagtagcagtattcgcatttgaattttcttttactgctggagctgtttgtttttcagctgcaggagcttgagtttttgtttctgcttttggagctactgttttagttggttgtttaatagctaatttttgacctacataaatagaagaagaagataaattattccatgacataatatcttgaacagaaacaccgtacttcacggataatgcccaaattgtgtcgccgcttttaacgttatgtgtagtagcattttggtctactactggagcttctttagtttcagctgcttttggtgcaggagcagtttgttgtgtagttggttgttttacttctgtttttgcttctgtagcaggtttaacttgttgtgtcgtttcttttttcacttcttgtttaacaactggagtgctagttgctttgtctgttaagtatttaccgttaacgtaaccagtttttccatcattgtaagtaattttgtgccaaccgtttgattctgttgtttcaacagttactttggttccacctttaatggaagtaagaatgctgtggtcaactccagcgccagaacgtacattaagccaagttgcgctaacagatttctctgctttttcttcagtagcaacctcgtttacttgtagtttttgacctggtacgattttatcagtggttaaattgtttgcttttttaatggcgtcaacagtagtccctttgctctgagcgataccccaaagtgtatctccagcttcaactactactgtgcttgcggatgcgatagttggtgcagcaaatgctgtaaccgcaatcccagctgtagccgcgatagttgcttttttcatattcataaaactcctctctttttttcagaaaatctcagtacgcaattagtaattgagaattaattttatagtgattaatacttagtttacccagtttttacgcaaaaaacaaatagataaaagctgttataaagagagatagcggactataccaactatttgtaatgaaactgtaacaattaaaaagcgaacgtgcattcttagggcttgagatgtactgctggggagtcctttaaggtgtaagtaagatatgaacaaaaagcaacaactttcgctatgggaaacctattgctttttgttaatagaaaaatttaatacatttgtaatattattctcatcagtttttccttttttctaaacctgaaataaattgccagatgactttgtgttattctataatagaaggtatggaggatattatataatgagacagaattatgatgatcgcaaaattgtgaaacagtatcgagaaatagcccgtcaaatcgttagaaaagagggcttatataaaaatatggaccaagatgaacttcgcgaacaaacgaatttttggcgcgaaaaattcaagacaaaaccaatgactgaacgagataagattaatatttttgcattagcaagagaagcggcaagtagaattattggtttggatgccgtggtcgttcaattaattggtgcgcttgttcttggtgatggcaaagtggcagaaatgaaaaccggtgaaggtaaaacattgatgtctttatttgtgatgtttatcgaagtgatgcgtggcaaccgtgttcaccttgttactgcgaatgaatatttagcaagacgggaccgggaagaaatcggacaagtgttagaatatctaggtatttcagttgctttaaacgaatctggtttggataaagatcagaaaaaagcgatttatacagcagatgtcatttatggaacagcttctgaatttggttttgattatttacgtgataatatggtccgtcaaaaagaagataaggtacaaagtggacttgattttgttttaatcgatgaggcagattccattttaatagatgaagcaaggactcctttacttatttctgatcgtaaagaagaagatttatcgctttatcaaacggcaaatgaactcgtgcaaacgatgatgaaagatgattatgaaatagaagaacataagcgttttgtctggttgaatgatgcggggattgaaagagctcaaaaattttggggcgttgaatcactttattccgcggaagcacaggtggaacttcgaattacaatgcttctaatgcgtgctcattttttgatgcataaagataaagactatgtcgttcttgatggggaagttttaattatcgacccgcatactggtcgcgcgcttccaggtcgtcgctttaatgatggacttcaccaagctattgaagcaaaagaaggcgtggaagtaaaagaagaatcgcgcacgcttgcgacaattacaattcaaaactatttccgaatgtataagagactctctggtatgacaggtacggcgaaaaccgaagaagaagaatttcggcaaatttacaatatggatgttgtcgtaataccaacaaatttacgcgtcaatcgtgaagatatgcccgatgacattttttatacgaaaaaggaaaaaggaagagcgattgtttatgaagtttcttggcgttatgaaaaaggtcagccaacactaatcggaacttcttctattaaaagtaacgagtggattagtagtctgcttgatgctgcaggaattcctcaccaagttttaaatgctaaaaaccacgcccaagaagcggaaattattgccaaagccgggaaacgtggcatggtaactttagcaacgaatatggctggacgaggaacggatataaagttagatccggatgttcataaactcggtggattagcagtaatcgggacagaacgccacgagagtcgtcgtattgatttacagttaatggggcgttcaggtagacgtggtgaccccggttttagtaagtttatgatttcattagaagatgatttattagagcagtttgaaagtaagagttgggaaaaactgtctacgaaacttaagcgtaaagcacctcgtgatggaaaacctgttaactcgcgtaaaattcactctgtcattgtagatgctcaaaaacgtttagaaggtgcaaattacgatattcggaaagatttgctttcttacgatgaagtaatcgatttacaacggaaaatggtttataaagagcgcgatcaactgttagaacgaaataaactaggtgtttcttctgaaaaaattcttcgagaagtcgcggaatattcatttattcatccacttgaacttgaggaagaagagctggagaaatactatagtcgtcaaaaagaattacttggtggcactaaattcccaatttccttcgatcaagtgacattaatggacccagttgaggttgtggaagaaatagttgcttggcataagaaagaacgtaataaattcccagttgaaacaattactgcaattgaaaaagaagtgtatttaaacttgatggaccaaatgtgggtaatgcatcttgacgctatggttcaattacgggaaggaattcatttacgcgcatatggacagcaagatccgctcgttatgtatcaaaaagaaggtgctcaattatttgagaaattccaagctgactatcatttctattttgcacatgctttacttgaattagatccagatggattgattcaaggataaattacaacttacgcctgatttttttcaaatttatgggtaatttagtgagaacgagggtattaacctatataatagtaacaaacaaaaataaatttagacaaaagaaggtggaaaagtgaaggggacattaacaaaattcaaacagttttttattgagaacaagtttgtactaggactattaattttcttgctagtagcgcttgatatttatgtattaacaaagattgcctttatttttgatccactaatggtaattcttaaaaccgttgctgcgccaattattttagcgggaatttcctattacttatttaacccaataattgactggcttgagaaaaaaaagtggaagcgaggctgggcaattgccttgttatacttagtaattatcggtttaatcattctattatttagttttgttattccagcagtgaaagatcaaattgttagcttatttaaatctttcccaggttattgggatcaaatcacccaaaaatttgacgaatttagtcgttcgagcttgtttgatcaaataaaagataaattaagcactaatatgagcgatattatgaaaactctttcgactaaaggaacttccgttattaatagcgcgattacaagtattggaagtattgttggaacggttaccgaagttgtactagcaattgtaactacaccgcttgtattattttacttattaaaagatgggaaaaaattaccggatttcctattaaaaatgttgcctgtaaatggtcgtgcgcatactcgccaagtacttggtgaagcaaaccaccaaattagttcttatattcgtggacaaattattgttagtttatgtattggtattctgttatttatcggttatttaattattggcttaccatatgcattaacgcttgcgatcattgccgcatgtactagcattgttccatatttaggaccagcaatcgcaattacaccagctattattatcgcaattgtaacttctccttggttattaattaaattaattattgtatggtgtgttgttcaattattagaaggtaaatttatttcgcctcaagtaatgggtaaaacattaaaagtacaccctattacaattttattcgttattttagtagccggaaatcttttcggtatactcggagttatctttgcagtaccaggttatgctgtgcttaaagtagttgtaacacatgtatttatttggttcaaacgagtttcagggctttacggagaacaacctgagagtgagtatgttgtaacgcctcctgaagaaaaagaataaaactaacaagagttctattagttagaaaggtattttctagcttaatagggctctttttttgatgattaaaagtgttcacagaaaagacataatttttttctttacaagatgagtccggtaatagagcggtttttatgtaaaatttttaacgtttactaaaaagaatgtgataaaatttattatttttcataagttgtacatatttttgaagctcttttcgtcataatataaagataacgcatgacgaaaggagaaacaaaatgattttcaaaaaaacattaattgtaggattaattggcataacttcagtcacactttttgcaccgtctgcttttgcagtatcttcagaaggggattcaaaagcatcaattaaatttaaagcaggaactggggtagttaatccggttgacccagaagatccaacgaaaccgatagatccattagacccaagtaatccgactgatccgggaactggaaatactggttcgctaacaatggattatgtatcttctgtgaatttcggggaacatgaagtatccactacggaacaaagctattcttccacttcaagaaaaccgtttattcaagtatctgaccgccgcggaacaggtgctggttggaaggttactgcaacagcaactgcctttaaagacgaggatggagcagcttcactatcaggagctaaactatcatttaaaaacggagaaacagtttcttcaagtacaacagcaacaacgccaactgctgttcaaacagtagaactacctaccgatggaacttcaattgtaaatgttgtttcggcaaaagaatctgaaggtatggggacttgggttaatcgttggtttggcgcgacacctaatgatgcagctagcttaaatgacaatgttaagttaatgataccagcaggaagtgcaactctaggagaccatgaagcaacaattacatggacactatctgacgcaccaggtgtttaaaaaatttgcgtttagaatttcatttctagacgcaaaatttttattaaagacgatgaaaggaaggtttaattgaaaaaaagttttcttagcatattattccttgttccattattagtgacattcggcaattttacagaagcaaaagcagcggagggagatgtcggctattccgttcaagctaatattcccgccaatcaaatagacaaaaaacaaacctactttgacttgaaaatgaaaccaaaccaaaagcaaacagtagaaatagatgtaatgaatagttcaaatgaagaaattcaagtagaagcatccatcaattacgcgtcaaccaaccaaactggtgtgattgattacacgaaaaatgacctttctaaaaaagacaaaagcctgaagtacccattacccgcattagctacaataccagacgaccaaaaacttctaacgatacctgtgaatggcaaaaaaaccgttcaagttacgattgaaatgccagacgaatcaatcgatggagttgttttgggcgcagtacagttcaaaaagaaaaatcaaacggagaccaaaaaaacaaaaggtgtctcacttaaaaatgaatattcctatattgttggtatgcagttatctgaaaccgacaaacaagtcaaaccacatatgaatttattaagtattaaaccaactcttatcaattatcacacagcgatagttgccaaattacaaaacgaccaaccagttattatcaaaaacctaagcattgatgcaaaagtgtatcaagatggctcgaataaaatgctttaccaaactaaaaaggcagatatgacgatggcaccaaattccaattttgacttcgggattgattgggagaataaaccgttaaaagaaggtaaatatagattaaaaatgtctgctacaaatggcgtagaaacttggaattgggatgaaacatttacgattggtaaaaaagatcaagatttaaataaagaagcagtgaatttgaaacaaacgagccagtggttgtatgttgcgattgctgcaggtgttttacttatagtattaattattatactagtaattagaaaacgaagaaataaccaagaaaaataaagaaaggagctggcacattggctttcaaaaaattaatgattgtattgaccatagcggctctttttctaagttgtaacctagtagtagatgctgaaacgggtagtgataatttagcagcaaatgaagcggtagtcactaatttcgcggaactgaaagctgccatttcagaagataacgggattgatactgtttatttaggagcagatgttgaattatctggaggtattatcatcccagcttcgaaaaaaacttttactttatcaggaaaaaatccagcaactggtgaaattcacacgttaacagaaacgatggcatcatctggggcgcagagcagtgtcatcacagttaacacaaatacaggcacaaaagaaaccacgttaaaagatatcaatgtgattgggaaaaactactatggaactatttcggtttacggggctgcaaaagacgtcgttcaaaactatgaaaatgttcattatcaaggtccgcaaatgatttataatctaaatggaatagctaatttcaaagggacaaatgatataacgattgcctccgttgtaagcggatcagcagcagtaaatgaagttgcggaaattaaaggagtaaacgtttctggaaaactaaatattaatcacgcaagcggaaatgcgaatagtgcgttttggtttggtggtggaacagctgatgtcaatacttttacagttgaagaaaatgcagatgtaaccgtgctttctaacgggacagggatgttttatcgctcaggcacaaaaccaattgatattgatgtaaaaaagaatgcgaaattaaatattacctctaacaataatatttttcgtgatacaccaggtggggcggttaaaattgctgagggcgccgatgtgacaatgacaaaaactgctggctctaatccacttctttggtcagcggataatattaccgtcagtccaaatgctcgcttaattttaaataaaacaggcggaactggctatattatccaattttataatgcaaccgcgaaattagatattcaggatcctctaagctttttggttgcgacgaatagtaatacgccaatgttttactggccttatgcaaatacatttaatttagacgcacaattggtaaattactggaatacagctggagcaattgatcggacagaccaaccagcacaaatttttaatttaccgagtggggaaaatgttactgggagtctaacttattcaggaacaacaacaaaaattctgtctactaatgctggaatgacgccaactaatttcaatcaaaatacggcgcgtatgattgcgatggggcgccttgaaggaacgataaatccagtgacggatggagaaagtgaagtcaccggaacagcgacaccaaatgcatttgttaatattgcgtatacagaaaatggtgaaaacaagctattatcaggacaagcagatgacacgggcaattatcgaattgctatcccgaatggctttattaaaccttacactgatctagtaacaacaattacacaagaccaaaagcgaattacattagatccagtaactgtaaaagatgtgactcctccaagcggagatgctgttccgcaagtattaaacataggggattcgctcccagatgcacaccatttagttacgaacattactgatcactcagatggtacgacaggtgaaggtgttactattaccatactaaatgaaccagatacgaatgtttttggaccaacagaagccattgttagaatagaagacaaggcgaataattacgctgatattcatgtgccagtttttattaaagatgatttgacagaaattcaagatgagcaagcattacgagcaaaagatttttccgtaaatgtaaaagaccttattaatcttaatgatgaagaagtgaaacaattcattctagataaatcggaagcaaaagcattcaatatcgtaactggtaaggacttaacgcctgatgtgaaagtaacaagcacaaatctaaaaaaagaaacaggaacttacacagccaccatccaaattggaactttgacaaaagaaattaccattcaagtaactggtgagctgaaattcaaccatgtgccagcaacaatgtcttttgaatcaatcgaacttaataatcaaaaaagtatcgcgaaacgaaacacggattttgatttatctgtacttgactcacgaggagcaggtagcaagttcagcgtgacagcatcagtgaaatcaccgctaacttcaacaacgaatccagcacacacgttacctaatgggcttattttcatcgatagcaatggtgagaaaaagccactttcagaagaaccaattactatctaccagtccaatgcgaccgatgacatgattgttcccattacttgggcagaaaatcaaggcatccttgtagaagcagatgcggctcacgcttatacggatgaggactacgagacaacaattgaatggacattgacggatgctccgtagaaaacctgttaattaaagttaacaggttttttgcgttataagccctttgtttttctatatctagtcgtttctcgtataataacgataagtaatatgcgaaaggtggaagcaaatgacttcagtaatgtggtttcgtagagatcttcgagtaaatgataataaagctctttatcatgcctgtaaagaagaagatttaattttgttatttcaagtaaatccagaacaatttatcaaaggaagccctagtcaccaagcatttttcgcgagtgtagctcattttcaacaagaactaaataaaaacacccatttgcaaatcatgtttggcgagccaatcgagctcctaaaacaattaaaagaaaaaataccaacttgggataaagttttcttcaaccgcgatgaaacaggctacggagcgagtcgagacgaggctgcccgagcattctttgctgataaggaaatcacagttcacagctatcacgatagttaccttcattcagctgaagaagtgaaaaaatccgccacagaatactacaaaatcttcactccttactacaaaaaatggcgcgaagaaataaaagaaatgcctttaaaagtcactttaaaaccagaaaaaattaggaaagaaagcttatttccaaattatgaggaacagtttagagaactgattcaagatttaccagcctttgattccggtgaaaaagcagcgaatacgagacttgcaaactttgtaaaagaagatttagcagactatgacaaagcaagagacgtcccagcgcttgataaaacgagtcatttatcacgctatttacgaacgggagagatttcgattcgtacggtttggcaggcacttcaaaaagaagaagctacagaaggacgagcaacattcgaaaaagaactgtgttggcgcgatttttataatatgatttatgtttcttttccaaagcaaaaaaatgagcctattcaagaaaattatcgttttattgaatgggaaaataatcgcgaatttttcaagaagtggcaagacgggcaaactggttttccgcttgtcgatgctgcgatgcgccaattaaaagagacgggctggatgcataatcggctaagaatgatcacggcttcctttttaacgaaggatttactaattgattggcgttttggcgaaaaatattttcaacaaatgctaattgattacgacccagcgagtaatattggcggttggcagtgggcggcttcgactggaacagatgcagtaccgtattttagaatttttaatccaacaacccaatcggaaaaatttgatccagatggtacatttattcggaaatatgtaaaggaattacgggacttgccggataaattcattcatcaaccagaaaaaatgtctgaaacagagcaaaaagagcatggtttgattttaggaaaagattatccgcttccgataatcgaccataaagagcgacgaaaattagcgattgcgcgatatgagtttagcaaggagcattctaggggaaatatatagataatgaatcaatcattgagttaaatgattgatttttttatggcagaaggtaagcagagtgagtcttgagcaatcttttaggagtaagatcctaggtatgttaaaattcacttatcaagtgataagggggaatctaaatggcgcaatttttaaagctatttgtaacaagtgctgtagttttcttagtttttgatcttttttggttgctcgtagcttctaagaaaatgtatcagcagtttatcggggatttaatgggggatgtaaggcttgctccagcagtaattttttactttatttatgtagttggggttacttttttcgtattagtgcctggaacggagaaaggtagcttaggttatacgattttagccggagcattatttggtttagtttgttacgctacgtatgatttgacgaacttagcaacattaaaagattggccgattacgatgaccattattgatctcgtttggggaacggctgtgacgactgtgacttccgtaattgtctactttattaatctgcatttcttctcaggaggaggttcgctttgaaggagtcggagagcaggcttctattacaaagcatgttgaacggggcagctgaagtaattagtaaaaaagatgagctaaatcgaattaacatttttcccgtagcagatggtgatacagggagtaatttagcttctttaatgcaagcgattattgataatgtgtcgccacgagaatactccacgaaagaactacttgaagaagtggccagcgcagcactgataggagcacgtggcaattccggaatgatttttgcccaatatttaaatgcggttgccgaaagctatcatcatttggaatctacctttgatggactagtcgaagcatttcaaaaagcagttcataaagcctatgaagcgttattagatccaaaagaaggtactattttatcggtgatgaaggcttggtctgaggcgcttgctgggacatatgagcaagaacgttcttttcaacaatcgctcttaaatgcgcaaagagttgcggaacaagcgttaattaatacagaatttcaaatggctattttacgaaagaatcggttagtcgattctggggcgaaaggtttttattatttcattgccgggctgaccaaagcttattgcgggggaacagtttctacaccaaatagttatgtggagcaggaaactcggcaagaacacactcattttgagacaagtgaaccgatttatcgatattgttctgaatttattattaaagaagcgaccatctcccatcaaacattgcgagaagtccttgcgccaaaaggagattccttagtgattgcagggaatgaaaaacaaattaaaatacacattcatacaaatgaaccacaagaaatattaagtttactatcagaatttggaaaaatgacctatcaaaaagtagacgatatgcgacttcaatatgaggtaacgaaaaatccacgagcaaaaatcgcgattgtaaccgattcgattgctgatttacccgaagatttcttattagaacatcaagtgcacgttttaccgatgaatattttagccggggaggaaaattttctcgataaattaacagttggaccaactttgatacaacaaaaactaacgcagcaacataaaatgagcacggcgcaacctaccattcgaacagtcgacgcattattatcgttcttagaaaataagtatcaacatgtactagttattgcagtttcagctaaattaagtgggacgtatcaactaatcaagcaacgaattaaagcgcgcgatttgtcgccggaatggattcgcgttattgattccaagttgaattccgttgctcaagggcttctagtaaagcaagcagtggaattagtggaagctggaaagccttttgatgaagttactcagaaaatcgaacagttaactgctcagacatttatttacgttgcagtggctgatttggcaccaatggttgagtctggtcggataccgcggattttaggcaggttagcacagaaactttctttatatccgattgttagtctggacagaaatggcgaaggaaaattgataggtgtgtcatttagtcaaaaacaaagtatgaaaaaagtcattaaaaaagttgcaaaattacaactgaaagagcttgctattacgcatgtttcttcagaacgtgatgcgaaactttggcagaaagaacttgaggcaaaaataggaggaaatagctatttagtggatagttcagctgcaattgccatcagtgccggactttccagtgtcgcggtcgcagggattaaaaaggaggaaacaatatgatgtattggatagtagcactcgctttacttgtctattttgtactttggtttatcatttcaaaaataaaaggtaaatattcgctggtagatattgcttggggcgggggatttgttgttgttgcttggaccggatttttaactacttttagtgtaacgacgcaaagtttgacgattcttattttagttactttatggggcgtacgtttattttggcatttagcacgtagaaattggaacaagccagaagattatcgctacgttaatatgcgcaaacgctggggaacgacattggttaatttaaaagcctttttaaatgttttcgttttgcaaggtgttctcttatttattattgctttaccaatcacgcatacttttgctaatgaatcagcggaatttacttggtggcaaatcgcaggaattgtaatatggattatcggttttgtgtttgaagttggtggcgacctccagttagaaaactttaaaaagaacccagctaataaaggaaaactactaacgacaggtttttggtctgttacaagacatcctaattattttggtgaagctcttagttggtggggtgtatttttagtcgcttttacacaaataacagatctttggctgattactagtcctattgttatcactttattattactatttgtgtccggcgtcccactacttgaaaaaaaataccaagaccgcgaagactttcaagcttatgccaaaaaaacctctaaattcttcccttttattggtaaaaaaggtctgtaaaagtactgatttaagtaggaaggtgctattaattgctatttgccgactagtgcgagtagaataagagttgggtatgaaataacatgcctaaatacaatacttatgaggcgagaggggtacaacagatgaaaaaagaaaaaacagtgttaattatgaatttcgatgaagaaagtatttcttatcaagctttctctgaaatgaaaagattgcaccaagagcgcaaaatcattggttatcaaatggcagttgtaaaacatgagccaggaaataaacttgttgcacaagattttcttgattttactggtgccgataaaaacatgaaagatagccttattggtatgctaattggtattttaggtggaccatttggtattttgattggttggatggttggagcaatcgttggttccatgcaagatgctggcgaagtgaaaaacgctctatccgtatttgaaagaacgttaaaaacaattccagaaggttcgacaggcgttatcttaattgcgacagagcaagaattagctaatgtaaacgatgttgtaatggatgagttacatggtcgtgtacaacgcatggatgaagcaattgtggccgaagaaattaaaagcgctcaagaaacagaaggaaaagcaaaagattctgctaaaaaacattggtttggaaaataaatcagctaaatgaggacagagaaatctgttctctttttttgttttaataaggataaaatggggaaataaacaacataaaacagtcagatagaaacttttttcaagatggtaacgcttaactcatttttattttctgaaaactatttgcatcaaattaaaaacatgctacaataaacaagttgtgaatttcacaagaaaattttttgtttggagatgaaataatttggatgttgaaagtagtccattaatgcagaaaattgattatagtacgcgcaaaaaaattgatttagtaaataatagtattcttcgttatatcgtgcgcgcgatgttagcatgtttattcttaacactagggactgcggtcgctgttatgattggtgataaagtcgatcattttgcacccggacttggtaaaatcacctatgcatttatgtttagttggtcgctcgttatgattatttatatgaatgctgagctgggtacttctaacatgatgtatatgacaacaggagtttatcaaaaaattgttaaacctggaaaagcattacaaattttgattttatgtattgtttgtaatttattgggtggaattcttgcagggtacttagtttctctgacatctgttttccataatttacctgctgaccacttcttatttactgccgttagcggtaaacttgaaaaagcgccattacaaatttttgtagaaggtattttcgccaatattgttgtaaatacggccgtgctttgtacacttcgaatgaaagatgatgctggtaaagtcattgcgatgattttcattattttcatctttgcattcttaggattcgagcacgttatcgccaacttctcatcattctcattagcatttttcgcttctggtggaacacttgctgcaatgacagcgggcaatgtgaccgtcaatttagtccttgctttacttgggaattttgtaggtggtggccttgttatcggactaggctatgcatggcttaaccgaacaaaatcaatttataaagactaataaaaaagttacctcagaaattttccgaggtaactttttttatatgcttttaacaggtaaattatttaaaaatgaccgaatgagcggctcgaacttcggtacttccttttcaactagaaaagcgtcatgaccgtattcagaggccacttcatgataagtaaccggcacatcccattcttttaaaagttcataaccgcggcgcaaatcgtgaattcggaaaagttgatcggtcgtaatgccaatcagcaaatacggaattttaatttttgaaaaagcgggtaaatcatcttttgcgggagccgtaacgtcaaataaatcaatcgcctttgttaaatatagataactattcgcgtcaaaccgctcgacaaaagtatccccttgatattgtaaatacgattcaatttgaaaatgctcttttgagaaagcggcaggcgaagactcggcgacagtgaaacgttcaaaccgcttggagaaaagttcgctcgtccggtaagtcatcattccaaccattctcgcagtagcaagcccgccctcaggttgaccaatatagttgccgccattaaagtcgggatcattcagaatcgccatccgcataattaagttataaccaatcgcatcaggtccggcagcaagtggggaggcgatgttgataatgctatctgttatatcggcataatcaatcgcccattctgtggcttgcattccacccatcgatcccccaatcaccgaaacaatccttgtaaccccaagttgttccaaaagttcacgctgcactttaataatatctttaattgaaaatccgggaaattgtaaccggaaaggctcgcctgtttttggattaatcgaggaggggccagtcgttccactacaaccaccaaatacattcgtacaaacaagaaaatatttgtctgtatcaatcgttttccccggaccaatataatcatcccaccaaccaggggcgtcatcttcaaaatgtttcgccgcatgagctgtcccagtgagcgcatgttctaacaaaatacaattatcgcgtgaggcagaaagtgtcccatacgtttcatagccaactaaaactggacttaatgtttccccgttttcaagtagaagaggacttttttgaaatagttctttttgttgtaaggtcacttctcttcacttcctcctaaatttgctctagtgctttcgttaaatcttgaataatatcatccgcattttcgattccgatagaaagacggatggattctggtttaacgccagctgttaattgttgttcttcgcttagttgttgatgagtcgttgatgctgggtggattataagcgattttgcgtcgccaacgttggctagatgtgagaataactccacagattcgataacctttttcccagccgcgtaaccacctttaacgccaaaagtgaaaatggaaccaggtccttttggtaaatatttttgggctaaatcgtggtatttgttgtcttttaagccaggataattaacccaagcaacttttggatggtcatttaagaaattcgctacttgtttcgcatttttcacgtgttgctcaagtcgtaaagataatgtttctagccctaaaatgagcaagaaggcgttgaacggggaaagtgcggcaccagtgtcacgaaggagcgagacacggagcttggtaatataggccgccgcaccaacatcattcgtataagacagcccgttataactatcatcaggtacaacgagttttggaaacttcccatttgcccagttaaatttaccagagtcaataacagcgccaccaattgcaaccccgtgaccaccgataaatttggttgccgagtaaacgacaatatctgcaccaaaatcaaatgggcgatttaaataagcggtcgcaaaagtattatcaacaattagcgggacatcagatgcgtgcgctatctcagctactttttcaatatcaataatattaatatcaggattaccaatcgtttcaatgaatacggctttcgtattttctttcattgctttttcaaaattttcaggttcgttagggtcgacaaaagtaacatcaatgccaaacgttttaaatgtatgcgagaaaagagtgtgtgtgccaccataaagtgttgccgctgcgacgatatgatctccggaaccagcaatatttaaaatcgagtaagtaatagcggccatgcctgaagccgttgcaacagcgccaatgccaccttcaagtaaagttaaccgttcttctaaaacagctgtagtaggattcataattcgtgtataaatatttccggtttcctgtaaaccaaataaggctgcggcatgttctgggctatcaaatgtatacgatgttgtttgataaattggtacggctctagaatgcgtatctccgtccggtgtatgtccgccgtgtacttgaattgtttcgaatttatactcattactcataaaatccactcctctttaatatgtatttatcagtaatttccatcaaaaaacctccctagcagtatataagccgccagagaggatagagtttcctaaacttggatttccgacttatctttcagaatatactgctggaattagcaccgtgaaaataaattccggttgctaaggcttcaaagggccagtccctccacctttcgtgataagaaaatactattaaattaagttatatattacgctggatgaaacaaattgtcaactaagtatttaaaaagtccaaaaatagcacttgtgtgtggaatttttgtgacaaagctgttttttagactaatatttcactttaaaaaggttttaaaatccattttttaggctattatagttaagactaattatatttcattaaaagtggggttagattagcacaaataaaggggagttgaaataaaaatgaagacatttacacgtattcttgttttattagcagggattgcgatgattgtacttggaatttggttcttattccatccaggtatttcattattaacctcaacattgatgatcggtttcttattactgatttcaggtattttccacacaatttcttatttctcagatagaaaatcacaaaatgtttctgggtgggtactagctgacggaattttatccatcttactaggtttcttgctattatttaatgaatttgatggaacattaacacttgtattgctgtttggtatgtgggtattgtttgctggtattatgcgtacaatcggcgcattcactgctaaacaaaataacgtacaaggctggggctggattttaacaattggtattattggtatcattgttggttttatcgctctattcaatccagttgtctccgcaattggtatcgttcttgttgtagcgattttcttcatcgttcaaggtatcggcgcaattgcaacatttttctttattggaaaaagttattaataaaaaaaacaagcccgtttattttaagcgggcttgtttttttattttgcgattatatgtatggtttataattgtcttttagtttttgtctatgaacatcgaagttctttacacgccaaggtttcggcgataaagaaataacaccatcttcttcaagtttacgcaagttagtagcaacgtaagctcgagctagatttaagtaattgcctaagattttttgagtaaaatagtatggaattaagcaagaaccgtctgattcaattcttccaaatctctctccacaagcaattaatccagccaaaactttctcactagaaggcaaattcacataagcttctcgctctaacatgggggaaaccatactttgcataagtgagttcatttgccaaaatacatctggtgagcttaagagtttattcaaaacatatttacgttcaaattgataaacactaacttcactaatagacgtatagtttgcaggtgatttggctcctccaagtaatgtaagcggaccgatagaatcttgtttacctaagaagctaataatactatcttctttacacgtatttttactcatcgaaacgaccccgtcttcaataatataaaagtaagttgtttccgcgccttctgttaagattttttggttgcgtctaaaacgaattctcttatatggaagaaccgcttcatttgaatcttttaacaagtcgagtaaatctacgttgtaaaaattattttcctcattcagtaatgacatataccgagtccccttttctcagtgttaatcattatcattatataggagatgagtcgaaatgtgtattaatgggacttatgatgctctaagtaattttgctttaattagacgatcacgaatgagaatacctaataatgcagcgaacaccgctttaataataccaggaataataaatggtaccatcccagtcaaaaatgcagtcggccagtcaagacctgtgctaactttaagccataaaacaccgaaaattaacgtaacgatggctcctaaaatattagcaacgattgcataaggaacagtgaattttgttttttcgagcaaccaacctgtaagtagtgcattaaaaataaatccgacaataaatccgccagttggcccaaaaagaatcccaattcctgctgtcatcccttgaaaaaccggaataccaactgctccaagcacgatataaactaaaacagatatggtaccgtgacgagctccaagaattgttgctgctaaaccaattgcaaatgtttgcccagtaagtggaatagggccaagtggaatagcaacttgtgcgagtaaagcaatgatgactgcgaataaagcatctacgactaaaaatttcaatttctgatcacgcataaacgtatctctccttaatgtaaacttaatactaaattaggttaacatttattaaataaaaaaacaatactatttttttctaatcagtaccttgcaatgaacactagtgtatgataaactatagtggtagtgaacaatatatagtagtggttacttattactagtggtaatttagcagaatggaggagttagcatggaggttaacccgcaattcaaaaaaggtgtgttagaactatgctgtttgtttttaattcaaaagaaagattgttatggttatgaattagcaaatcaagtttctaaatatattgaggttgcagagggagctatttatccggtacttagaagattagttaaagaagagtattgctccacttatttagtagaatcaaatgaaggtccatcaagaaaatattatcagctgacggtaaaaggagaaatttacttgaatgagcttatctctgaatggaataattttacagatagtgttgctaagcttttaacagagggggaagcagtaaatgaataaacaagattttttaaatgaattaaaccagcgcttagaattgctggatccaaaagagcggagagaactattatctgactatcaagagcattttagaaatggtgtggaagctgggaaaagcgaagaacaaatcgtctttgatcttggaaaaccggaagaaattgcggcagatattttaagtgaaagagatattcgcgaagaacaggtagaagcagattattattatgtacctcgaaaaaatcaaaatgaaaatagatctgtgagtaaacaagttttaattggaataggtttatttttcctagacatctgtcttattattccgattatggtttcgctatggtcactcgttatttcactttgggcaacggttggtggattcttgctttcaccggtaatacttggcgtagaactattatttggcgctgattttgaattttatcaaatgtttatttccattgggcttgtaggactgggcctcatgctgctgtttgtagcaaatgcacttactaagtttacaagtaaagctactatggctattatccagtggcacaaatatgcggtcaaaggaggcggaaaaaatgcgtaaacatcatttaagtaagaaattatttttcgccggtttggtgctatttattatcggagctatcggcgtggcagtcacaatgaaatcaggcactatgattgaaaaaggcgaaccactaacaaaacagtgggacttatcggctgaaaatattaatacaattgccttttcttccgagcgagatgtactaattgaatggaaagaaagtacaacaggcaagaattatattgaactcaaaggaaattactctgcaaatgacaaaaaagccattcaaaaattagaaccagtctctgaagacggaacctcatttaatataacagttcctgaagaggatgattggtataacaactttggcaaaatctacgcttacgggcaacaaaaagtaactgtctttttaacaaaagatacgaaattagctgatttaaaagtaaaatctcattcaggagatattaatgtttctgattttaaagtaaagaaatttgttagttctacaaattctggtgagttaaaagtgaataatttagaagcaaatagcgctcaaatggctacttcttctggagatttagatttatcgaatattaaagcaaatacgtcaattgaaacaggttcaggaaaaactgaacttactagtttgacgggcgatttagaagtaaatggtggttcaggagatgttaatgctactggcgttaaagcgaaaaaacttaaaattgctattgattctggtgacatcgaactgacaaatagtaccgttacagacttagccgttttaacaactagttccggagatattgatgcaaatacaaaagggaaagtacaagctgaatctgactcaggagcgattgaacttgctggcgtaacgaataatgtaactgcgaaaacgagctcaggcgatattgatgttgcctttaacaaacaagtagaaaatatcgaagtcaattcagattctggcgaagtcgagctgaaactaccaggtgattttaaagctatttatgaaacaaaaagtaattctggtagcattaaagcaccaacaagtgattctaataccgctaaccgtgtaactgtgaaaactagttccggagatattacaatcgaaaaataaaaaatcaatgcgctaattacttaattagcgcattctttttgttaaaatggggtaaagtcagataaactgttttaacaatttgcgcaattggaaggagaatggatcatggattttcatattagaaaagcgactaattcagatgctgaagctattcagcatgtggcgactacttcatggcaccatacttatcaagatttaattccaagtgatgtacaagacgattttttgaaaagattttataatgttgaaacgcttcataatcggatttcagcgactccttttgctgttttagaacaagcggataaagtaattggctttgcgaattttattgagcttgagaaggggaaaagtgaacttgcggctttttatttactaccagaagtgacccagcgcggacttggtacggaattattagaagttggaatgacgttatttcatgtgccactaccaatgtttgttaacgtagaaaaaggtaacgaaacagcaattcatttttataaagcgaaagggtttgttcaagtggaggaatttaccgaagatttttacggctatccactggaaacaattcggtttaatttgaatcatcatgcatttgaagaggaataaaaaaatgtctattctagttgaataatcaattaggatagacatttttttattttgtcgcagcttttccacttgtcgattttccgcctcgtaaatagaagaaaataacagctaggattgccataattattcctgctaaaacagaaacaccaacagaaatgatcatgccagagacttgaataatgctaaggatgatgactgttacaacaactccgtatgcaaatccccatagcgcaaatgttgaatagctcgcttttttgctaaagccataaaatatttcgcccaacgtggaagcgactaagatgacgggagcagcaaagagaattgctgaaaaaacgagctgcggtgtgacattttcatagaggattgtttcgactaaaagtgcagaaaaaatacctaaaacaaaaatcgataaataagcaataataaaacgcatcaaaaaaacctcctaaagtacactatattatagcataaattaggaagttagcttaacatctagcccagttatcatcactatgctttacgacacgtgtaatacctcgaatcaagttgaaaatgagtatcgatacattaagaaatacgatgaaaaaaactgtagctagagccaaaaagttaatagtatcagcactatttgtactaaaaggaacgttattataaagtaaaatcattacaaccatcccagcgacaaaagttgtctgtgtcagtaaagcccatttcacgtgatgacgtgtttctttatctttatttgtacaccagataataataggtgcgataaccggggcaaagaaaaggctaaaataactaagtgcgctaataatttttttatctaacatttctcatctatcctctcatttgtttataagtctagtatagcggggaaagagaaatgaaaccatcgaattaggtgacgatattaaaatgaaaatgacagttttgtcatgtataaaaaaacgccccttcgaaaaaatcaaagagacgtttctttatatgactgattttaaggaccaaactttactacgccatcttcggtacattagaacggcgcgaacaccttcatcgataatataggcaagccaaacaccgacaagaccaagcccagcggaaattccaagtacataggagaatggcaaactaacaatccacataacgataagcccacatatgaacggaaagcggacatcaccagttgagttaagactactaatgataataatattggtggcacgtccaagctcaaggaaaatcgaaagtaagaataattctttcgtcattgcaatgatttcggtatttgttgtaaatagactcataatcggttcggcaaatagataaatcgaagcactaactataatggcaacgactaatcctattttccaactgcggagaccttgtttataagctttatcaatttcttttgcgccaaccgcacggccgataattatttgcgaggcttgtccgagcgcgatagcaaatagtgcgacaaattgactaactgttgaagcgtaaactttggtcgtaagtgcttctgtacctaaaatagcaatgattgcggtaacgacaagttgtgagccagcataggataagttttcaccggcagagggaagacctagacgtaaaatcgaataaagtagttttttggacacttgctccaattttttgaaatgaaaagtgtaaccgatgtatttttttaacatccagatagctagaaccattccgacaaaattcgcgacagcagtagaaatcccaacgcctgccacgccgtaatctaagtaagcaagtggtccgtaaagaaataagtaattaccgacaacattgataatactgattgtcacagggacgagaatggattgtcttacataaccatgcgcccggagaataggtaaaatggatgcatgaatcgcgataacaactgaactcccaccaataatttctaaaaatggcgcgccaacttggactaaatgaggatcaattcccatccaagtcaggaagtttttcgacataaaaatgaaaataatactcatcgcaatcccaattaagaaagcgaccactaagccatttgtaatcacattctcgatttctttatgttttttcgctccaatcatttgtgcgacgataatctggacaccgacactaataaaaccataaataataatcgaaatgacaagaatctgattggcaacccctgtcgcagctacagcatcatctgaataatgccccaacataaagacatcaatataactaatcatcagtcgtaaaaattgctctagaaatatcggccaagcaagtgtaaaaagactgagactagcaactttattcactgaattcaattgtttccctcccttcgttttaaatacaattaaagccattataaggtaattaaagttaaaagtatagattaatttcaaaataacactaagatattgcttgacaaaaaatgaataactcatataattagttaggtaaactaatcaaatgatagaaagaagtggagaaatgtcttcaaaaaatcaagacttggggcactcagtaatcaaggctttcatgaattttaagcatgctgaaataaagagtttccaaattccaggttacagtaaatctgaaacaagatttatttttattttatctcgtgggcttaaaagcagagggccaaaaattcgtgtttccgatcttggtcacatgcttagaatttcaaaaccaagcgtcacgcaaatgatacaatctttggaagggaaagggctaattaagcgagttcagaacccagaagataagcgctcgatgtatgtggaactaacagaagtcggagcaggtgtatcgaaaaaaatgttcgatgagtttcaagctagttttgaagatatgcaggaatttttaggtgaagacgatatgaaaaaattgattacactcctagagaaacttacagattacttaaacacaaaatccgaaaataaggaggtataaaccgcaaatgatgaaattgatgaaaagattaaaaccttattggctgagcattacggccgtattagtccttactttcgggcaagttattgggcagctttttttaccgacattgatgtctaatattattgacaaaggcgttgtaaaaggcgatacagattacatttggagcactggaatgcaaatgttacttatatcgttcgcttcagttattttgtcggtcattgtcgtttatctcgcatcgagaatttcgatgggattcgggaaagatttgcgcgataaaatttttacaaaggtagaggacttttccttacaagagtttgataaagtagggacttcttcactgattactagaacgacgaatgacgttgttcaaatccaaaatgtactttatatgatgatgcgattaatggtgatggcgccaattatgctactcggcggtattattatggcagttggcagggacgcgaaattatcgcttatttttgtcgttgttttaccgctactacttctacttgtagttattctaggtggcaaagcaatgccaatgtttaaatcacttcaaaagaaaatggataaattaaaccgtgttattcgtgaaggtttaaccgggattcgggttgttcgttctttcaaccgaaatgaagatgaactggaaaaatttgaagaagcaaatgctgactatgcaacaactgcaattaaagtcaatcgcttgttatcactaatgagtccattgatgatgttactaatgaacttaacatcgattgctattgtctggattggttcgatttttattggtaatggtgatatggaagtaggggacttgatggcgtttattcaatacgcgatgcaaatcatgatgtcctttatgatgctttctgctgtatttattatgattccacgtgctggagcttcagctgagcgtattaatgaagttttagatatgaaagcagaaatacttaaccctgaaaatccaaaaacaagtacaccaccagcaaaactatcatttgaacatgttactttccgttatgaaggtgctgaaaaaccagtgattgaagatattacatttgaagcaaaagctggcgaaacgattgctatcattggtagtaccggagctgggaagtcgactttaattaatatgattccgcggttttatgatgtcgaaagtggcgttgtgaaaatcaatggaatagatgtgcgtgaaatggatcaatctaaattacgccaaaaaattggacttgttccgcaaaaagctgtgttattcacgggaacaattgcttccaatatgcgctacggaaaagaagatgcgaccgatgaagaaatttgggcggcgcttcgaactgctcaagctgagaattttgtatcgaagcttgcaaatggtttaggcagccgcgttgaacaaggtggtaataacttctcaggtggtcaaaaacaacgactttcaattgcgcgttcactaattagaaaaccagaaatttatatatttgatgatagtttctcagcgctcgattttaaaaccgatgctaaactacgcgaggctttgaaagctgaaacaacagaagccgtaacacttatagtggcacagcggattacttcagtcgtaaattccgatcaaattattgttcttaatgaaggtaaaattgctggaattggaacacatgaagaattgaaagaatcaaacaaaatttatcaagaaattatgaagtcacagctgtcagaggaggaaatcgcatgagtggtccaggtccaggtggtggcatgagaatgcaaacagccgccaaaccaaagaactttaagcaaacactattccggcttcttggctatatgaaacctcgctctgtcgcaattattgtcgtttttatctttgcgattctatccacgatttttaatatttttagcccgaaagaactcgggaaagcgacaacagaaatttttaaaggtgttatgagtcctgagggaattaacaacgataagattttcaatatattaatgattgttttagtgttatatcttggtagttcactatttagttttattcaacaatatgtgatgtctagtgtggcgcaacgaactgtgtatgacatgcggaaggatttaaaagcaaaaatggcccgacttccgctaaaatattatgatacacgctcaaatggtgatattctaagtcgttcagttaatgacatggataacattgcgaacaccttgcaacagtcactaacccaagcaattacagcgattgtccaaatgattggtgttttaatcatgatgctaacgattagctggcaaatgactttaatcgtactagtaactgttccaatcagtattattctagtcgcaattattgctggtagatcacaacgttacttcggtgcacaacaacgcaacttagggattttaaatgatacagtagaagaaacttacggtggtcaaacaattattaaagcttttggtcaagagaagaaaacactagtaaaatttgatgaagtaaatgaagattatttcaaagcagcgaaaaaagcgcaatttatttctgggattatgatgccagtaatgcaatttgttggtaacttaggttatgtcggtgtctgtgtggccggcgggatttttgttactaacggaacgctacaagttggggatattcaatcatttacgcaatatgttcaattgtttactcagccaatttcaagtgtggcaaatattgctaatatcattcaatccactattgcttcagcagaacgtgtttttgaaatgatggatgaagaagaagaaaaagacgaaattccagctaatgttaatcaagttgctggtgaagaacatagtattgtgttcgaccacgtgaaattcggttacactccggataaaccacttatgacagatttaaatattcatgttgaagaaggtcaaatggtggcgattgttggtccaacaggtgctggtaaaacgacgataatcaacttgctaatgcgtttttatgacgtggatggcggggagattcgtatgagaggtatcgatacacgtgatatgaccaaagatgctgttcgcgagaaattcggaatggtactgcaagatacttggttatttaacggaactattgcagataatatcgcatatggtcgtgaaggcgcaacgaaagatgaagttattggagcagcaaaagccgcttatgcagatgattttatccggagacttccaaatggttatgatactatcttgaacgaagaaggttcaaatatttctcaaggtcaaaaacaacttctaacgattgcccgcgcgattttatcggatccatctattttaattttagatgaagcgacttctagtgtagatacgcgtacggaattaaatattcagcttgcaatggggaatttgatggaaggtcgcacaagtttcgttattgcgcatagactttcaactattcgtgacgccgacttaattctcgttatgaatcacggtagtgtaatcgagcaaggtacacaccaagaattacttgatgctaaaggattctatgcagacctttacaacagccagtttaccggagctcaagcagtttaataataaaggcaatgtggcttcttgctgcattgtctttttttgagcaaaaaatttgtttgattttggataaggaggtatggttaataaagaagaaattgaagaggtgaaaatagatgtatcaatcgattacggcaaatgatttagaacaagaattaaaaaacacacagcttaatatactcgatgtgagagatgctgatgcttttgttgaaggacacattccggatgcgataaatattccaattaatgaactacctgaaaaactaacgtcccttgataaagagaagccttacacaattatttgttacgcaggaggtcgttctgagcgcgcaagtcaatttttagcggcagaaggatttgacgtaacgaatgtaatgggcggcatgggagcttttcacggcgctgtaactaaataaaaaaagcgagacttccattttgaagtctcgcttttttatttaactatgttttcttttgcggaaaaagattactccgatgcctgttaaaataataccgattaagacaatcgttgtttgacttgagtcaccagtgtttggaagggctggtttttcagaagatttattctggttgtttggcgtatcattagaatcttcggatagcacaggatcatcattattatcatcatttatagctggagtattcgggtcaggattaggatctggtcctggtcccggcggtgttggtggttcgtttcctaaaacaacatttactaggacggtaataggatccgcttcaacgccatttgaacttactgcatttaatgttacttcataagttccgacttgggttaaatctacttcactatcaaagttacttgtgactgcactgccatcacttgttttagctgaaatatcttttaggaattgttgggcagttttagtagtatctttcgtgtaagtgatgctattatttgctgtaattactggtttttcaagaatagtaacagtaacttgttttggagctgcttttaaaccagcgttttcggcatttaatgttactgtgtaaacgcctggtttattaagatctacaacgctatcaaaatcactagtaacaggtgtgccatcatctgtttcagcgtgaatatctgttaaaaattgttcttctgtaacagttgtttgctccgtgtaacttattgtagaatcgctagtgatatttaatgtgtgatcgatgtcaaagtagtgatcatacgacccacctgatactgaataactattgaagcctggtggtgtttgataagatccggcgggattattgtaaagcgcattatattccatttttgtaatagtatcaaagtaatcttttgtaatgccgctcactgtaattcctttatcgtcaatgcttaatcggctgccatcaattttagtattatttaaagtaaaataagtgccagcagatccagcgttagttgtaaaagggaacatatagccatcgaaatttacgctccgctgtgtcattaaagtaaatggtacaaaaagcgtttggttagcttcatcaaagtttaatgaggagcttttaattgtgctattgattaaaacggttctaccaacattttgtccgtaagcagataagttaagtaatttagggaatgagtcaatcccgcgaaaatcattaattccacaaaattggacaaataaggtagctaaatttggtatggattttagtggcatgatgtcagtaatagaaggattactatctaaatttaaataagttaagttcggcattttattaaatttagttaatgcgctattgtcgagcttaccagggcttagatttaagttggtgatgttcgttaaaccatttaaatctggtaatgaatcagttgttaagttattcccatcaatactaagattagttagactaggtatttttgcaactaaagcgtagtctgttacccccgtatttgataaatgtaaaagcgttaaattatgcgcgtaatcaagtccagttaaatcagttaggctattattactaatagtgacgtttgtgattgtgtccatttgcgcttcggtaatgtcacttgtacttggttgacctaacagcccatttaaatagctttttaacactgggtcgggaatgttgacaatatcttgcgcagccttgataccaatgttttcttctgctgaaacattagctgaaaacggtataataaatggagatactaaaagagcgcataagccaattttgattcccattcttcgcattaatttattcctcctctaagcaatatttgttttataataccatatggattcttaaaacaattccactaatatgagtgttttaaaccctgaatatgtcgatattgtgaaaaatgagactaaaaaataaccgtaacagaggtttcctccgttacggttatttaaaattaaaagatttttgctaattcagctgcttcttttgcaccagcagaaataatgtcttttgcttgatcgggttttgcgttgtgaccttctacaatgaccatttctggttcagagatgccgaagtgagctaaaacatttttaacatagtttaaggacatttcaaagctttgcagtgggccatcggaataaataccgccgcgagcattaagtaaggcgatttttttatctgttactaatccaattggaccgtttgctgtatatttgaaagtttttccagcttgatttaaatagaataagtaagttaaaaattgtgctgggatactgaagttccaaagtgggaacgccataacgattttatcagcagctaaaaattgatctaaatacccatttgcaatatcagctaatcgtttttcttccggggttaaagtctcaccagctacttctttatgtaatccactcatcattgttacatcataataaggtagatccgcttcgaataaatctagttctgttacattatcgtccggatgggactttttgtattcagctaggaaaatttcgtatagtgccacgctgactgagcgttcggcaggtaaaccatttgcttttatgaaaagtacgtttgtcattacatcttgcctccattttttttgaattatctattaagtgtagctcattttggctattaacggcaagtatattgcttacaaaaaattagccactaatatttgagcagatattttgtgatttaaaaaaggaagcgtataatagttgatatatcatttgacatgtcaactatggaggtggaaatgctggaaccatgtacgaaacgttcagaactgctttaccggatgcatttgttatctaaagaaataagtcatgtatttgaacaacagacgaatatgagttttacgaaagtagagattttatttcatattaaacaaacgcctggtcaaagtcagaacagattaaaagaaaagctgtatattgattcagcaagtattacccgtcatttgaagcgcatggaagagcaagggcttatcgttcgtaaaaagcaagatgagaataaacgctatacgtatttatttttaacaccagctggcgaggcggaattaacttccttacttacggaaaaagaaaaattccaaactggggctttagaaggattttctgaggatgaagtcagtgccttacttaaatcagtcacaaaaatgatgaataatgtagagaaattggaggagaagttaaaatgaaagcagttgtaattgaaaattatggtggtaaagaagagttaaaagaaaaagaagtagcaatgccaaaagcgggtaaaaaccaagtcattgtaaaagaagtagcaacatccattaatccgattgattggaagcttcgtgaaggatacttaaaacaaatgatggactgggaattcccaattattttaggttgggatgtagcaggtgttatttctgaagttggtgaaggcgtgactgattggaaagtcggcgatgaagtatttgctcgtcctgaaacaacgcgttttggtacgtatgctgaatatacagcagtagatgatcacttacttgcacctcttccagaaggtattagttttgaagaagctgcatctattccacttgcaggtttaacagcatggcaagcattatttgatcacgcaaaacttcaaaaaggtgaaaaagtcttgattcatgctggtgctggcggcgttggaacacttgcgattcaacttgcaaaatatgctggagcagaagttatcacaacagctagtgcgaaaaatcatgaactacttaaatcactaggagcagatcaagtcattgattataaagaagtgaattttaaagacgtactttcagacatcgatgttgtttttgatacaatgggtggtcaaatcgaaactgatagctatgatgtattaaaagaaggaacaggtcgtttagtaagtatcgttggtatttcaaatgaagaccgtgcgaaagaaaaaaacgtaactgcgaatggaatttggcttcaaccaaacggcgaacaactgaaaaaattaggtgaactacttgcaaataaaacagtgaaaccaatcgttggcgcaactttcccattctctgaaaaaggtgttttcgatgcacatgcattaagtgaaactcaccatgcagttggaaaaatagtaatttcttttaataaataagatttttggaaagctagatgctgtcatctagctttttttgctgtttgcgtgcgtagaatggataggctataatagcaaaaaaggtggtgtctaaatggaaactagagagcttaagaacggacaaataatgacgattagagaggctacaaaagaggatgcgagcaatattgttacttatctgaatgaagtagcaggtgagactgattatttatcctttgggaaaggcgagttttcatttagcgtagaagaagaagcggaatacatagaagaaggggctaaaaacccgggctctattatgttattaagttttattgaagatgaacttgcaagtgtttctcaacttatcggccatacaaaaaagcgagaattacatacatgtgagctgactatttctacccgaaagaaattttggggtttagggatagggacacttattatggagggattaataaaacatgctaaaaaaaccgagcgtttaaaactcgtttacttagaagctgtttctgaaaacaagcgagcaattaatttgtacaaaaagttcggatttattgaagctggtgagattccagcattaatgcaagtggaaggacggtatttggacgtaacaatgatgtacttagttctttaatcctctacaagaaaggcgaggtcattagctacttctatatcactaagttgtttagcaacaatatccgctccagtattaagaaaaatagccatttgactaaggacgcgaaggctaatatcagaagtgcgaatatctttatcaataagtttttgcaaagtaccttcttttaagcgagtatttgattcaatatcattggtagtaatatgtttatttgctaacaattgttcaatcggatgcatcatatcacctcttttcgaatagttaactttatgaattaattataactaaatttgcttcgttgataaactataaagccttgaaaattgaacaaaaaagggagaagcaaatgaaagatttaaaagacagtttgaaaattttatatcaatttaagacagattacctaaaagtaacattgttgttgacgatcttgcaggcatttgtgattgggccttttatttattatttctttttctttattcttcgagttatcggagtgccagggattacagacgccaatctcggagaagttttttcgagtcctgttgccgttattatgctgctgattttagctttactcattttactatttgtatattatgaactgggtttctttataatgatggccatttatcaattgcggggagaaagctataccgtatttaaaatcatacaaaggctcaatgtaaaagcgaaatactttcttagttatcaagcgatttattttctgctatatttctttttacttttgccaattgcaggattatctttaccaattacgataacagaaaacctctatttgccgcattttattacagatgaattaatgaaaacgacgacaggcacgtggctatatgttattgcaattgcgattattttctatattagcgcgagactcgtattcgcattaccatattttattgaagataaatcactcaaaataagtggagctatccggaaaagttggaaattctcgcaaaagcatttattttttatgttactaaaatgggttttaataattgttgtgattggctttttagtatcgattatcgcgacgattattatgttaccgcttctcttagtagaaaaaataactccaggaattgcggtggttatagctggtattactttaaccatactgcaagtgataggtttctttgccgctgggatttttcaaggaattattgcgcaattattagtgaagaatgcctttgctattgaaggacaacacgctcctgtcgcacgcaaccagtttccgcataaaaagagatttattattgttgcgataatcgttttcattatttttagtggttttaatatttttacagtaaatgcgactttatatgaacctaatacgaaaataatagcccatcgtggtgatacaatgaatgctgttgaaaatacggtggaagccattgaatcagctgcaaagtccggggcggattatagtgaaattgatattcaagaaaccaaagatcatcagtttgttgttttccatgatatgacattgagaagacttgctggcagttctaagcgagtagcagatatgactttaaaagagttgcagcaaactaaagtgaagagtggcgactattcatctcatatagcttcttttgatgaaattatcaagacagcgaaaaagaataagatagatttactcgtggaagtgaagttgcacggcggggaatcgagcgatatggtagaacgacttgtcacattgttaaagaaagaaaaagtaactgataaatatcttgttcagtcgctcaaccagcctgttatagaggaaatcgaaaaagcagatccgtcactaaaaactggaatcatcctagcgcttaatatcgggaatttgccaaagacatcagcagattttattgtcttagaggatttctctattaataagcgattactaacgcaagccaaacaaaatgataaaatggtgtttgtctggactgttaataaagaaaaattaatgcaaatgtatttgcggaaaaatgtagatgggattattacaaactatcctaaaaaagcaatcgaacttagagaatcttttaatgaaaatgattctttgcgaagtcgtatcgagaataggttaggattttaaataaaaagagccgcaaacagtgattgtttgcggccgattttttattttaattcaaatgattttttgactgtgtttttgctgaagctgattaattctttggcttctacgtctactttattttgcgtatcttgtagcttatagtaatcggttatttctaaagtagctccaggttgaacatctttgtctacaccgcccatgccgccatcagcggatacggttgtttctaattgtgtcccattttggaaaacttgttgatcgatggctaccataaaggaagtattttctttactgttatttgtgaattttgttttgactgcaattgcgtcatttccagcatagtcttttactacttcagagctaaggatttctactttataatcgccaagtgtatttggatctgttttctttttttctttcgtctctgcttttgctgtttcttttttctctgtacttactttatcttctgtcccaccacatgcagttagggctagggcaaaagttataatccccattaatagtaaaacgcgttttaaatttttcattttcttctctccttcttaatttatctgtatctattacaccatgcggagataagaaaagtcctatgcaccgggcataggactaagaaaagatttctgtataaattccataaatcataatacaaacaaaaatatatacgacaataccaacttttcttgttcctttagaagaggacttaagtaaaggtaatttggaccagatgccgcataaattagtaaatataatgaaagcagggaatatcaagaaaaaattagcgaaaaagttttcgatgttattcattttaacgccttctgttggtggggtaaataatccaaatgccatgaaaatatagcctaatactgcaactaccattttccaagtatgaccagttctaaagccgggaatatgtttataccagggaataaaatctttttcgtattcatctgttgaagttgcccagtttatttcgtccgcgctgtcttctatggtagcgaagtcgcttaagtttgttaattcggaaacaaaggtaggtccaagcgaatcatttttaatagcggttcggaattcttggatggtttggaaacgttgctctgggtcgaaggatgctgcttgcatggcgattttttctagagaagtagctgtttctttgtcaggtaaattattttttccacgtaaaagttcaagcataaggacgccgatgctataaatatctgaacgagcgtcggtttgcgagtagccatattgctcaggcgcagcgtatccgatcgtcccgagattgactgtatcttgattttttcctacttcaaaaacacgagatgcatcaaaatcaattaattttaaaacgccatcactggaaatcataatattggacggttttatatcacgatggataattgcgtttgtatgaagttccgtcagtgcgtcagaaagcatcaacatcagtcctgtcacttcatcagcatcaaagggcgcatttactttcattaagtcagctaagtttttcccgttgatatattcttcatatacaatcagttcgctgccatttggaatcatcacttcaattttgggtaaatagttacttgataattttttaagttcctctagtactggagcgaaactaatagggattattttacgaactaataattcgcctgttgcggtattacgcgttagtacggcaggattttctttgttatttagattatctaattctttatattgttcttctataaaagcaagcgtcatttctcccattttctaaaatcccttctacactttatagtgaaattatagcatgaagcatagtagtcgggtacttatttcgtgatataataaaaaaaacaatcgggggtgtgccttatggatggggaaaaagagacaagtaaattacttcatgaattaaaaaaagcgacaaatctacgccaggttttagatgaaaacgaggcggaatttaaatcaagtgaaatggttacatatttaaaagagttattagtagagaaaaaattaacaaaagctagcgtcattcgtgcggcaagactccatgaaacatatggctatcagatttttagtggagttagaagaccttctcgcgaccggactatcgcgctttcttttggttttaagctttcaggtcatgaagcgagtcgattactaaaatatacggaatatccacctttatatgcgaaaaaccgccgagatgctattattatttttgcactggatcacggttatactttagatcaaaccaacgattctttatacgatttggaagaggcgcttattgaaactttcaaagaggaaaaaccgcttatttagattaatctagaaatcaggtataataaagaaagacttacttgattggagactagttatgataaataaacaattgattttacaagcagcaactagtgaaaaaaacgctggtgatttcccgaaagttatacaaggttttaaggaattaggtattataaaatatcagtttttagttcaaaaaggcgtttatgtattttgggatgaacaggataatatggtagaagcccagttaaatggcgttgctatgcctgtttctaaggaaagttcagcagaaaaattacgcgaggcaataaaacaagcacaagcgggacggatagattttgagaaatttattgaattagcaggtttggcaggaatcgaactgtgggaagccgatttaactgcaatgaaagtgaggtatatagataaggctagtgagaatttggtgattgaacccattcctggcatttgaattcaaaagacaataatttattgtctttttttagtacttttaaaaattgggaaatatgttaagctgaaaaaggtgaaagaagagaggtaacgaaaatggatatgataacatactttctaatagcgcttagtacgagtgttgtggggagctttttaggtattggtggcggagtaatacttttgccgattttactactaatgggcgtttctcaaggaactgcggcttttagttctgcgctgacggttttcacgatggcgatttttacttgtagtatttattataaacggaagcaaggaaacgtaggattagcactaaaaattgctataacgagtattccaactacttttcttggtgcaatcgtgaaccaaatgctgccagaagcggtttatcgttttatgtatggtgccttaatcgtgattttattacttctgatggtttggaaaaagaaacgcaataatgaaaaacctcattttttaagcaaatatcggataatgccttatttatttggggtaattattgggtttttagctggtttatttggaatcggtggcgggccaatcgttataccaattttattacttatttttatgctaaatcaaaagactgcctctgcgacttcaagttatgtgacgctacttacttctcttgcaagtatcggctcctacgcgattgttggtggaagtgacttttcgattggtatttatatgatacctggggcaattttaggcgcgcttattggaacaaggttaaataaacttttggatgaaaaatggattgctattctgtttaatattttgctaatagccctttttgttttaaatttaattagaatttaacgaattacaagctatgaaaattagcttgttttttgttgtgacgctattttatgttaagcttagaaggagtaggaggggttatgatgaaaaggaactggcaagactttgttgcatttttactaacaatcctaactgtaacttggataattttaacttggggattacatatttcagatattgtaccgggaggagaaaaaggcatcttttatcaattaattccactttttttaggagttatttcgacaatcagtgtttttttcgtgaaagaaaaattggtgaaatggattttgcttggttttaatattttattactcattttaatttattttgtataccatattggggaaatagggatattgtaagcgggggttgataggatggatgagccaacggaagcggtaatctatcaaattttatctaaaacagaagaaaaaaacgcgacgatggatcacttagtttttgaaatgatgcaatttccgggagctgccgcatttacgaaaaatgaattacttcttggcgtctactggttagaaacatttaattatatttttcggagcacagaagatcatacgacaagatattttcgaacaacaaaaggccacgaaaaattagcagaattagaacttaaaaaaagaaaggcttgaattcctaaaaaataggtattcaagcctttctttatatatattttgccatagtgatgtcggtatttttgaaaccaactttatcgtacaatttaatggcggtttggttatgggcgaaaacgtggagttcgattttagtgatgcccatttcttttgcaagaacatctagcgcttcaagtgtttttgtaccaaaacctttacctcgaaatgtttcgaaaatcacaaaatcataaatgaaagcatgtttttcatcgacatggaaccataaataaccgattttttggtcagtgaaaatgctgtagaggtgctcatttggtgtagtaattccgtcaaaaagtaatttgttgaaagaagcttttgaattggttaaggcttcctctttggaccatgtgccggctgctattttttctgcggcatagtctggaattgcggtagttaaaaaatcttctaaatcagaagtagtcattttttgtaaatgtaagatagggtttcctccttttatttatgctcggtgaaaacttgcatattggatgaatttacgtgacattttaatatggcccgcttcattcggatgaatgccatcagcgcaaagtaaatcctcatagtggaattcggcaagaaaactatcacgaatatcaataagatggctacctgtttcggctgcaattcgtgaaatagcattgctgtatctttcctgccagcgataaatcatctcgacatcgccacccaaaaagtggagaatattttctttgcttaggccactacgcgtaatgaaatcgaaataacgtttagcatgaaggggaggcagggtcattaaaattggtttaatatctaattttttaaggcgtgcaatcatttcaagtagttgcgtttcaaaaatgtctaaaggcgtgcttggaatgtgttctttatctggattttcagacacttctgcccaattgaaatcacagtcatttccgccaaattcgatgatggcaatgtcatttgttgcgtctttttccaagtcttttgttagaatttcgtggccttttgttatcgtccgacccattgtggaatgattttgaaaagtcaggccaagtttttcagatgctcgtttaatgcagttgtttttaagcaaagtatagcggtttttttctggattgaaaagaacgcctttcataatactatcgccccaaacaccaactgactgaatggttttcttcataatcatcactcctttcatttatcataccataaaaaaagcaaaagacgcgctttgtatctctaaaaaacgcgtcttttactttttaatttgtagctttgtataaatagattttccagtaagatgctttgttattaaatgctttttcgaaggttagtccaatctcagaagcgttgtcgattggaacggcagacaagatatattcgccgccaacagctttaaatgcatctatattaaagtctagttttttaatatgttttttcgaatctttgccgaaatcgtagtttttccctaactcggcagaaaataaataacaacgatttccccagttatcataataatcttctagaacggggcttttgtctagttcgccagcgatgatttttcgaaaggctcttttataagcaagtgggtaagaattaacgtagccatccacagtgtaaaagccattttcttgggaaacagacggatgcaggccaatgctaccaacgcggtaacttgattgcggtttaccaatgtaattttttatttctgtaaattgctccgtcgcataaaattgattgatgctaggtgagccatttccagtccggtagtaaatctcagaattattcgcgaaaacgacgacaagttgcaacacaattgctaaataagctaattttcgccaccaatttccttttttgattaaataaacgattgcgattgcgaataaaccataaaataaaaacggttgtaaaaagtgaaaacgtgaaaaattaaaagtccgcataatttctacattttctttgatccagttccagccacgataccaccaaaaaccgtaccaaaatgataaaaataaattaaacccaaatagccataaaaacagtttttctttgacccattctcgtttaataatgattaatacaagaacgagaagcaatatcggcaaaataacaaatccagctagagcctgatcgtgtgtgtgtcctacaatgaaatttttaatactaagtcgaatggaacttaaaagtgataaatctggcaaactaaattcgcttcttgaatctggttttgggtgtaggaacatcgcataaataaaacgataatttactagcgcatataataagcccatgtacaccatactgagtaaaaagcgaatattgacttgttttttcttaataacatcatataaccagatacagccaaccattactaaaaagaaacaaaatcctaatattaaactagaataaaatgggagcagtgtcagtataactacattccagattcgccgcttgttatttctaatgtttaaaaacgcccacaaagcaagtggcatccctagcgtactgagcatacctgatggccaaaaaggcgtcagtgcaaaagctaaagaaacaaaataaagcggtacgagatattttttatctttaatgagataatcccttgcccataaaaacaatcctaaaaatgcaaatacacgtgtaatcaactggctcaccgcaaacgcaataggtgtactgaaaatcatataaagccaatcaattccaacaaattctgaatcaaatgaatctcttgggacactatcatccattatctgatcaatatttgctgttccaacttttgctgtataatccccgctatccaaaaccattttgtaccacgtcacattggaatctaaattatcatgtatcctcacgtgactattcccgccaagaataaacaatggagcgacataaattaccaataagagtactgcaataattagccacttatgctttttccacatagttctcctccttcattatctctaatatatatgtacccgagaaaactattttcaattataccaaaggaaatcaggttttgttcatcaaaaagggtatatttttatcacttttttatacataatcacactttaaatatggcggaaacgtcacaattctctctgctatataggaagttttgtatgattggcttgttccagaaagccattctggctagtatgatacgtttaagaaaactattcaagtagaacgcataggtctattttgagtaattttaataatgagtagtaaaaggagaattatcatgctaaaacacaactggcaaaaagtgttcgttgtaatggttgcggttgcgcttgtttttcaactggttccatggtctaatatcttcgccggagcagaagaaaatcaaacaaaaacaacccaacaagtaactcaaccagataatcaaaaagtagcggatgaaaacaaaacaaccgtaatacctgacaataaagagacaactaaaaatctagttaatggaaagcaattactaaaaggttccgttgattggaattttacaaataaagtaacagacgcaaacgggaatacgaaagaaacttatgcaccaggagactcactcaagttttcattaagtttggcaatcccatcctattcagaagcagtcttggacgaaacttatacattttggatacaaaaagacttcttccaaggagacaaagtgacatttgttaatccagcaattgatgggttaacgccgagacaaaatgtttttacagatgattccatgaaaaactcgattggcacaaaaacaattaatggtgtccagtatattggttacacacttaaatttaatcagagcccggaagcattggcaaaatatgaagatgagccgcttactaacgctaaatttgatatgtttgcaaccataaatacgactactacaacaaaagaagattatcaagccattgtaattgaagatgataaaaatgtagatattagcaaaattgaggtgcccgtaacacctccaactccagatacagataatggcgtactcaccgcctctaaagcaatcgattctgcttggcggttagataaagacactggaaaatatgttaaagtcgctacatcgtccacaaattatacacctgaaaaagatgatctagttttctattatgtttatgccacaaacaattcaggggaaaatgccgttttagaaaaaatggtagatgaattaccagctggtttttcaattattacggaagattcaccagaatggcaggctttatcaactgcatctggctcttcgcttcaacgcggttgggttgcttcagcagaccaaacaaaccttgcccctggcgcaactagatacgaattaccattttccccagctcagactatctccaaaaatggtggcggtatttatagaacaattgcagcaaaagtaacagatccaacgaaagatttgactaacgttactaaaagcccgactaaaggcggcgaaggtaaatctggttctgtaacgccaagtgggaaagatgtttatgacatggcaattacgacaaaaattagctccacttacgataaaaacaataaatatattggtgctgttagtagcacaactacgcccgtttctatatcagaaggaagcacagttggcgtaacatataccgcgattaaccaagggaattatacaaaagatgttgtcgtttatgcctatgtaccagcaggttatgaactaaataatgatacatctgatttcaaaaatacgaatgataaatggaaatacgaaacaaccgtgcctagtggtggcggtgtgtggagtgatatcaaagtttactccattacactttctggaggcatggcatcaggtgcaactgcaactgctacgatgtatatgaaagctatcggtatgccggatgatgggacttatagcgcagtagacttttacatggctggagaaatcggttcattttctaactttaatggtgattctactttagacggagcaattaccgatgtagattcgacgccagatatgaatccaggaaatgatctgattagcaatgttgatggttctactgtaaaacctattgatggcttccaaaaagaaaaaccacatgttgtaaaagaaaatgctaaatcaacagctactttacaagatgaagatgacttcgattttgattatgtcacattcattaaaacaccagaagtaattccaacagaagaaaaagtgtttgaaaaaacacgattatcggcagctgatgcagaaaaaacagcgcgcaatatgataggtagcgacatcatgggttctgccttgaaagactatacgcctcttgcagacgatggtagaattacttcaccaaaaacatatatggtctatgaaatgaacattaacccatctggagtagaagacacactaaattcttcgttcacagatacacttccaaaagggttgaaaatgcttgaatatgatattgctggtttaaattctagcaataaacacatttatggttttacaacgaacaaatttgaaggtacaccgaaattcacaaatgcagacgggcaagacgttattgtttatcaaaaaggcttatattctgaaaaacaagtttgtatcgcaaactccactttaaatgatgttggagtaaggtattttggaaataacgcgggtaaaatgggtgtaactggttccgtaacaaaagatgcacgtacactaacccttaattttggacagccggcagcagacccgatgtatagtgaaacaaaagcagcttacaaagtgtacatgattgtagttattgacccagacgaaattgactacagcagcatcatgcaaaataaagcaacatacacttacaacgataaagttattacttcttatgaaaatagcgaaatgtactgggatgctggtggcggtacggcctatgcgaaaaaatatgttttagacaataaaacaaatgcatatataagtggaagccaatataatgtggctactcctgatgcagacggtaatttatcagttggctataaaattcgagtaagaagtgcgtatgaattcgataaatcatctataaatattggagacgttattgctgcagataattttaaatctatctctaatgtggaagtaaatggttatgaggcaagtccaagcacgggcttccaaattgacggggaacttgaaaatcctgtaccacttgctacgggtaagtatgcggtagaagcaaaagcaactgcaaacacattagctatcacaaatccggctgatattccgcaaatgcaactatataacgttcttttcaaagtgaattatcaaaaagtgaaatatggcgcgaaactagttaaccaagcagctggatcagaagttgctacggttgtcccgctaaacttaaaccttttgaaacaagacgatataagcaaaacagcattgacaggctatgaattcaaagcttattatgcagatgaaaatggaaaagcagatttaacgaaaccggtcaaagatacaaatagtaatgaaattgttatgacagactcatctggcgcagcaaatttcatcccgacaggttataaaacaacttctaaaaatcaagactggaatgtagttcttgttgaaacaaagacaccaactggttatgaatcaaatgaaaataaagagtatccagttacagtgaagagcgatgcgaatggtaatttatccattccaactagcacagaaacaggccttgaaatcaccaatgatgatcacggggcaacaacagcgactattgacaaccatgcagacgtgaaaatgattgatgtgaatggcgcgaaaacttggactggtgacaaagaagcagatcgtccagattccatcgaagtacaacttttacaagacggtgtagcatacaatagcccaattactgtaacaaaagcagacgactggaaatacgaattcaaaaatgttccagaaacaaatgcagatggaactaaatacacgtatacagttttagaaaatacagtagctaactacacaagtgctgtcacaggtcttgatattaacaacacattaatcaaaccagatgtaaaaatgattaatcttgacggtcaaaaaacgtggaaaaatgatacagaaaacgatcgtcccgcatccatcgaaattcaattacaacaaaatgggcaagattacggtttcccagtaacagttacaaaagataacgattggaaatacgaatttaaaaacctaccagaaacaaccaatgatggagcggcttacaactacacgattgtcgaaaaagcagttccaggctatgaaaccaaagtcgacggaatgaacgtcatcaacacgaaaatagatgcaccaaaaaccactgtctctggtaaaaaaacatggaaaaacgacacagccaaagaccgtccagactatatcgaagtacaacttttacaaaatggacaaacttatggtgatccagtcaaagtaacgaaagagagcgattggaaatatagcttcaaagatttacctaaaggcgatgctaacaacaacgattatcgttactctgttgctgaaatagcagttccaggctacaaaacaaccacagatggaatgaacttaaccaatacaaaagtaaccgatgagaaaaatgtaactacagcgagcggtacaaaaacttgggtgggagacaatgaaaaaacacgtccagactccatcgaagtacaacttttacaaaacggtaaagcttacggaacaccaatcaaagtaacagcaaaatcgaattggaaatacaactttaccaaccttccagagaaagacaaaacaggtgaaaaatacagctataccgtatctgaaaaacaagtatctggctatagtgtaaaagtaaaaggcatggacttaacgaatacaaaagtaacaaaaacgacaccaaaagttacacattctaccaataaaccaagtaaaacgaaaaaattacctggaactggtgatacgaatggtatgttgctatttgctggtggattagtactattattcttaggactacaccttagaagaaaaagtaccaaataaagaaaacagccgatgcgagtaagcttgggtcggctgttcttttgaataaagtaaaatcgggtatacaaataaaaatgaaataagggggcttcatgatgaaagaagagctactgcaagcaatcgaagtcggcgagccagttttacttgtaacggcaatcgggtatattgtaggaattgtggaaacaaaaggagagctcattcgcttaaacgatgtgtatatcaattgtgtttcagccagtagagtaaaccgtttcagccgaggcttagctgtgaatgtcaatcaagtcatcggtatgcaactattaagtaagtcggagaaagatgaaatgattggcggctggaaggcatatgtggcgcctacagctggttaagctatgctataatataaacagcacatacggaggtctgaacgaatgatattattagttgttgatacacaaaaattaattatgacaaataatctttacaatttcgattcactggtatccaatatagaacgattaatcaccaacgctcggaaaaataaaatagaaataatttatgtgcgacatgacgacggccctgatacagaacttacaaatggaaaagaaggcttcgatatttacgaaaaattccaaccaactaaagacgaaagaatctttgataaaaccgtaaatagcgcttttaaaggaacaggtttacttgcttatctcaaagaaaaaggaacgaagaaaattgtagtagcaggattacaaaccgatttttgcattgacgccacggtgaaatgtggttttgaacatggcttccagatgattgttcccgcccacgccaattcgacggaagataaccattttatgtctggtgagaacagttataagtactataatgaatggatgtggcctgagcgttacgcgacctgcatatctatagaagaaacgattaatgaaatggaaaataactaagagagtctaagcattacgcttaggctcttcctacttttttgatttaatggtagagtaaaaggagtgaatttttgcaggaggaaatgatgattaacttaatttttgatatcgacgacacagtttatgaccaactgaaaccctttgaaaatgcatttaaagctacttttggcaaagcggaccacctgaaaatcgaaaatttatatattaaaagtcgattttatagtgatgaagtgtatcgcaaggttgtcggaggagaaatgcctaaagcagaaatgcacgtttaccggattacgcaggcattaaacgattttgattaccaaattacgaaaaaagaagcagaagcatttcaacatacttatgaacaaaaccaacgcaaaattgaactttcaccgggaattaaagaaatcctcacctgggctaaaaagaaaaatataacgatgggaatcattacgaacggatcaaaagagcatcaacaacataaaataaatgatttacaaataaacgaatggattccagctgagcatacttttatttctggtggagtaggtatcgaaaaaccagacaaaaaaatatttgagctagtagaggaacaaatcggtattaagagcgcggaaacctattatattggcgattctttcgaaaatgatgtgattggttcaaaaagtgccggctggaaatcaatttggctaaacagacgacaacatatacaacctaacaatgccacttaccagccagattattgtattaaaaatgaacaagaactagctgctttgttgcaagatttattataaatactaaaatcttttcctttattaggagaaggtttttttgttgtaaattgacaaatttgtttaataaggatattatagagtcgttaagtctttaattaagaaggtgaaagtatgaaattttcaaaagcaaccaattatgcgctacatacgatggtttatttagcaaatttgtctccggaaaaatctgtaggagtgaaagaacttgctaccaagcaaaatgtttcgccaacgtatctttctaaagtgttaacaatgcttgtaaaagctggtttcgttgagtcagtaacaggtgtaaacggcggttataaattagccgaacctgcaagcagtattagttttttagatgttattcaagccattgaaggaaaaggtgctttttttcactgtgatcctaaaaatcatagcgaaagtcagccgcactgcttaatcggcgaagtaatgaataaggcagagcaacaaatggaagactatttaagcaagcaaactgtaggtagtattgtcgtagaaattgaaaaacatcaacattaaaggagtgctgaaaatgaatcatcatcaccacaatcaccacggggaagctggttttaagaggaaagtagattatttggatcgacctgaacggagcgaagttttagcaccagaggaatttttacagaggatcccaatggaaaaaacagcgagcattttagatttaggagcgggaacaggatttttaacgattccggcagcgaaaaaggttgaaaataccgtttttgcattagatttagatacgaaaatgttggaattaattgagacgaaagcgaaaacagctgaattagccaatgtaaaaacattagaagcgagcatggatgatattccgcttgaaactagttcggtggatgttgtgctggcatcgctcgtgttacatgaagcagattctctcgcggatgttttgcgtgaagtgagtagagttgtgaaaactggcggctactttgctagtttggagtttgatacgaaaggaacggatttgaaaggtcccccaatggaaattcaaatttcagctgagaaattgaaggaagagcttgcgggatttggatttgaagtagtgcagaactgggagcttgatgagggaatgtatgtgagtattgcggagaaaaaagaataataaaaagttcacgcctgaaatagcaatataagctatttttaagcgtgaacctttttatatttacggagaaacggggattcgaaccccggcgcggcatacaccgcctaacagatttcgagtctgtccccttcagccggacttgggtatttctccactgtgacatagaatgccgacaagaagtattgtataataatattaacaaaaataccagtgttttttataaaaggagcgtgctaaatggaaagaaaattggttcaagaaataaatttactagaaaataaaaaattggttatgaatttgaatattgttgcgattgttattgtgcttgtattaactgttttaggtcttgctttttcaggtggttttgcaattacgaatggttttatggggattatttggatgtttggtggctatgcagtagcaattgttattcatgaagccgtacacgggattttcttcaaagcttttcgcccagaatcaaaagtgaaatttggttttaaaaatgggatggcttatgctggaagccccggagcattttattcgagagcgcaattctttattatttcgattgcaccatttatcgttcttacgggattgttcatttttctgcgttttctcggtgtgaatgaagcagttctatatttaatttttgccttacatacatcaggttgtgtcggtgatttttattactgcattcttttgattaatcagccagctgggatcgttgtggaggatacggataagggaattagtttttattcagaaggttaagcttggtaacgatttcaacaaagtgttaaaataaggatatacttttagaaagaggtgcttgattttgaaacgaataacaattggtaatagcgatttaaccgcttcagaaatttcgctaggatgtatgagaatggcagatcttagtaaagaagaggcgaacaaagtaattaacacagcacttgaaaacggtattgatttttttgatcatgctgatatttatggcggcggtaaatcagaggaagtctttgctgatgcaattgatatgaatgcaactgttcgtgaaaaaatgattcttcaatcaaaatgcggaattcgtcaaggattctttgatttttcaaaagagcacattatttcttctgtggaaggtagcttgaaacgcctgaaaacagattatttagatacactattacttcatcgtccggatacactttttgaaccagaagaggtagcagcggcgttcactgagcttgaaaaaagcgggaaagttcgtcatttcggcgtaagtaatcaaaacccaggtcaaatcgaattactaaaaaaatacgtggaccaagaattaattgccaatcaactgcaatttagtattatgcatactggtatgattgatactggttttaacgtaaatatgacgattgatccttctcttgatcgcgatggcgggattttggaatatagtcgcttacataatatgactatccaagcttggtctccgttccaatatggtttctttgaaggagttttcttagataacgataaattccctgaattaaacaaaacaatcgataaaattgctgcatacaaaggcgtgactaattcggcaattgcggttgcgtggatacagcgtcacccagcaagcttccaaacagtggttggtacaatgaacccaggaagaatcgctgatattgcaaaagcttctgacgtaacacttagtcgcgaagaatggtatgaaatttacagtgcggctggaaaccaattaccttaatgtaaacagacacttgggctttttgctcaagtgtttttttatgtgtaataatgatagtgaaattcattctcaattagaaataaattttatcaattagtttgatatgatttttaaaaagtgctataataacaagtgagttaaggacgtttcctttaaaaattaattataataattattgtttagtctgtttttcgcagttgcgaaagcagatttttgtgttttttagggtaatgggaatcattatcatttggagaggatgagcattatgaaagaatggatggagcggaattggcaatttgtaacgactggtattagtggggttttaattgttgtcggtagtctaatcgggaatgatgtcggtgatttttggacagcggtgattttcttgagtgcctttgttattggcggatttgaacaagctaaggaagggatagcggcgacgattaaaacgaaaaaacttaatgtagagcttttaatgatattagcggctacaggggcttcaattattggttattggtttgaaggcgccatacttatttttattttctcagttagtggggcattagaaacgtatacgacgaataaaagtaagcgcgaaatcacgaaattaatggcttttcaaccggaacgagcttttcgttttcttccaaatggtgatgttgaagaagtagctgcaaaagatttgcaattagatgataaagtactcgttcgacctggagaaagtgttccaattgatggtgtgattgttcgtggttcaacaactttgaatgaagcagcaatcaatggtgaatcggttccagttgagaaaactgttggtgctgaagtgtttggtgggacagttaatgtcagcagtgctatcaccattaaagtaacgcaaacttttgataatacgatttttagcaagattattcgcttagtagaaaccgcccagagtgaaccttcaaaaaccgctcgttttattgagcgatttgaggatgcgtatgttaaagcagtattattatttgttttagtgatgatgtttttaccgcattttgcactcggttggtcttggaatgaaactttttatcgcgcgatggttttacttactgtagcttctccatgtgcgctagttgcttcggtgactccagcgactttagcagctatttctaatggagcacgtcacgggattttattcaaaggcggcgtacacttggaaaatttgcgcggtgtaaaagcaattgcatttgataaaacgggaactttgacaaacggaacacctgaactaacagaccaaatatttaaagaacacatcgataaacagcaagtaataaatgtggcggcagcaatggagcggcagtctttgcacccattagccgcagcaatcaccaaagcattagatatcgaagtaacggataaattaacagaaatagaagtaacggatgtgccaggttggggagtgcaaactagctacaaaggcgaaacttggcaagtcggtaaagccggttatgttggggcggaaaatgctgccaagttttcaaatggcgcgtttgaaaggcttgctagcgaagggaaaacgattgtatatgtcgctaaagaaggcgaaatcgttgcgatgtttgcgctcaaagacacttgccgacctgaggcgattcggaccattcaagctctaaaagcaaaaggtattaaaacaattatggtaacaggagataatgcacaaactggcgctgcaatccaagctgaacttggtatggatagggttgtttctggatgtttgcctgagaaaaaagtagatgttttaaaagaactatcgctgacttatggaagcgtggcaatggttggtgacgggatcaatgatgctccagcacttgcccatgcggctgttggcattgcgatgggcgagggaacggatattgcaatggaaacagcagatgttgttttaatgaaaaatgacttagagaaaatcccgtatgcctacacgctatccgaacgacttcactggattagttggcaaaatatttgttttgcaattgccgtgattctgctcttaataacagcgaacgtttttcaagtaatcaatttaccgttcggggttgtgggacatgaaggaagcacgattttagtaattttaaatggacttagactacttaagtccaaccggaaatagtgattcatttgactgctcgtctttctctagtctaagatagatgagcagtttctttttaggaaaaaaggggtattgcatgatagattggagatgagtgcatgagaaagattaactggacacaatggatagcgctgtttgtttttgcatcaatgggaatttcagtcgtttttactatctatgaaatttttaacgcaccaataaagcaaccagcaactggaccgcatgtgacattacgaggggattatatctttttattatttgaaattttactaggaatttttattttgttattgccttccattattgcacgacgcttcaaatttgaaatacctggactggtttatattttatttattgtttttttgtacggctcgatttatcttggaaccgttcaaaaattctattcaaccgtgccacactgggataaaattttacatacttttagtggggcgatgctcggagcaattggcttttcgttcgttagcttgttaaacgcaaatgataaagtagtcatgaaactgaagcctggttttatcgctgtctttgcattttgttttgctgtaacgatgggcgctttctgggaagtgtatgaatatacttttgacgggattatgaacttaaatatgcaacgctacaacctatcaaatggtacaccactaactggacgagcagctctggaagatacgatgacagacataattgttgatattattggcgccttattcatcgtcattgtaggctatttcgcactgaaaaaaggtcggccttggatggaacgctttgaattcaaacgaaaaaactggaaaaaagaaccaaagactaagtaaaatcaaaaaagcatttgagcctactcagatgcttttttagttgcacaaaaacgccgacaactttggggccatgaaatgattgactgcatcttagaacttttctacacttaaattgagaagaaaacttttaaaggagtgaggaaatgtttttagatacgggtaatttagaggaaataaagaaagcgcttcaatttccgttttttgagggtgtaactacgaacccaaccattttactgaaagaaaatcagcccagaaaaacccatattgctcacattccagcaaaattagtatttgtccaagcagcgggattaacagaagaagaaatttgggaagacgtgctgagaattcaagaaattaagccagctgaagggactgttattggcttgaaaatccctgcccatgaagctgggataaaagttattgctacagttcgcgctaagtttccagatgcgattattttagcaacggcaattttttcatccgagcaaggttatattgcggctctttctggggcagactatttagcgccgtattacaatcgcatggaagtaagtggtttagatgcagcgaaaacgatagaagaattgcgctatgttctagatttacaaggtcttgaagaagtgaaaatcatgggggcgagttttaaaaacagccgccaaattatgcaagcattagcgagtggggcggacacggtaacgattggttatgatttattcttacaaatgatgaataaaccgctcgcactcgaaagcattgaaaagtttaacgaacataatgcagctttacctaaatgaaaaaaagtaagtatccatgatattggatacttactttttttatttgtcttcgtcgcgtaatggtagattatttacgtagctatcagaatactgtaagagtttgcgacttgtttcgaatcgcttcttcacctcatctgatagttctttatttgttccgttatagttcgttgctgctccagtttcaaagctttcgtctggctgatacatgtaagaatcagtgaaatagcttccttcaggcatagtgtatcgttcaggaacataattgtttgttgaattgagaatatcagtaccaaacattatttgattgcctgtattaatacctaataaattcatcacagttggcataatatcaatctcaccgccaacatttttgatttcaccagggtttttcattcctggataatgtaggaagaacgggatacggtaatcgtctgctggatctgctttaagctcggtagaacgattgacgtattttttctgttcttctggaagttgatctgttttgataatatggtggtctccgtagaaaacgactactgaatcctcccaaatgccactatcttttaatttttgaatgaaagcgccgagttgtttatccgcgtaatgaactgcttcaaaataattgccaagttctgtatcttttaaatcactcggtaagttgatttcttgcttttcttcagggatgttaaatggcatatgactacttacactaattaattgcgcataaaatttttgattgtttttatattgtttttctaagatagggaacgctttgttgtataatacttcatcacttggagagaagccaattacgtcttcatcgccaaagaatttacgatcataaaatttatcaaaaccaactgccggataaaactcatctcgattataaaaactagcgtcatttgtatggaaagtggacgttgtataatcatttttaccaagtagtcgaggcatagatggaatgacccggtcgccgtaagtttgggtatttgtatagtatccgctcgggaaagtggatgtataaacagaccattctgcgtcggctgtatttgatttagaaactgtttggaaaaacttattggaatacattgtttcgttttgtaaactatctagcgttggagtgattgactgtccatcaattttaatatttgttaagttccgctgaaacgattctaattgcacgataatcaggtttttccctttcgcagcaccaaagtaatcaggtttttcttttaaatccacgcctttaatatcacgaacgtttttggcggtaatgtctgcggctttaacatgatcagttccagcaagagcagtactaatattaaatgtaaaaattcccatccgctttgctcgtttcgaatcgctaatgatattttgttgcatcataaaataagtaaatccgctaagcacaagtaaagtacttaaaaacgatacgccataaatacgtttagttaggcggaatgatggaaaaacatggcctttttttatgctgaagtagaggataaatggaagtaaaataatatccatgatgtaaagccaatcagttccactaagtaaactagtagcgcttgtttttacgacaccgacttctccgataagtgagaaactatgatacgtaggaacttcattatagaagcgggcataaagtacgcaaactaacataagaatgccgataaataaagacattccagcataccaataaacgtgagaacgaaccggagcaaataaatgaattagcccaagtaataatacgataaacagcaggtccattcctagcgccaagaaattgggatctttaaaaatctggaaataggcaaaagtgaacttactaataattaataaaaaataaaataaaatcaattgaattcctctttctagcatgctttgtgccgaatacgcacaaatccattctctctaattttagcctaatcatgcttacagtgcaaatcatgaaagatgattcagatatatttgggtaataggtgctattttaggaagttataattagttttgtattttttttcacaattctattgacctttaaagcgcaaaagtatactattttagaagatcgtaaaaaggtaggcgacaaaatgaattcattatttagaagaaaaccgatagaagatttaatgcataataaaagcggaagtacacatttaaaacaaacgcttggaccgcttgatttaaccttactaggggttggagcgattgttggaaccgggatttttattttacctggtactgtagctgcgaaaaatgctggaccggcgattatattttctttcgtcattgccgcgattgtttgtgcgattgctgcgatgtgttattcagagtttgcatctagtgttccggtagcagggagcgcctatacatacggctatgtcgtctttggcgagttaatcggttggttgctaggctgggcacttattttagaatacgggcttgctgtggcatctgtcgcaagtggctggtcttcttatttaaatgcgttgctttcaggttttcatatttccattcctgaagcagtatctgggccttttaatccagaagtaggtacatttattaatttacctgcaattattatcgttctcgtgattgctttcttattaacacttggaataaaagagtcaacgcgtgtgaatacgattatggtagctatcaaggtaggcgttattttacttttcttagtagttggcgtgttttatgtgaaacctgacaattggcaaccatttatgccgtttgggattagtggcgtaatgaacggtgctgcgcttgtattctttgcttatttaggctttgatgcagtttcctccgccgcagaagaagtgaaaaacccgcaacgaactatgccgattggaataatagggtcgttacttatttgtactattttatatgtagcggtttctgctgtcttaacaggaatggtaccatacacggatttaaatgttactgatccagtggcttatgctttgcaagtgattaatcaagattgggtggctggtatcgtatcactcggagctgtagttggtatgattactgttattttagtaatgagctacggggctacaagattgatttttgcgatggggcgtgatggtttattaccaaaagtactggcagaaattaatcaaaaatatcaaacaccagtcaaaaacacctggatttttgcatttattgtggcgattattagtggacttgtaccccttgatagattggctgaattagtcaatattggaacactcctagcatttatgatggtgtccattgggattatcttcttacgtaaaaataaatctattcaacaatcaggcttcaaagtgccattttatcctgtgttgccgataatttcgtttttattatgcgcatttctcataagtcgcttatctgttcacacctggattctttgcgggatttggtttgtaatcggattaattgtgtactttgcatatggtaggaaaaatagtgaattacttaaaaaataattaacttactttttgtaagtcgttttattggtatttggacgctccttgtgttgtaatgaatgtattacaataaaaggagcgttttttacatggtggaaattagtgaaaaattacgattaggcgaagttgtcttaaatgtaggtcatttaaaagagatggcaggtttttatcaagaagtaattggtttaactttattagaagaaaatgatcggattgtaaggcttggagtgccagattcgagtgaggcgttgcttgttcttaaaaaaatagaccatgcagttgttccagaagtgccgcggattggattgtttcatacagcatttttattaccaaatcgagaaagtttagcagatgtactcgtgcatttagctcagtcgggttatccgattgacggagcgggggaccatgcttatagtgaggcgctttacttacatgatattgaagggaacggcattgaaatctacgcagatcggccgaaaaatagttggatgcgtgatagcgctggaaacttaccaatggtgacagagcaagtcgatgtggatgatttattaaaaatcgcaactggagaacctttcactggaatgccaagtgggacaattatcgggcatgtacatttacaggtagctgatgcagacaaggcagagcaattttataaagaagcgcttggtatgaatttaacgacagcaataccatcagcaagattttttgcagcaggcgattatcaccatcatattggatcaaatatgtgggctggacgcaatttggaaaatcgtcgtgagaatgaagtcgggctagcttggtttacaattatcacaccagacaaagaagcgataacaacgaatctagagcagcaaggttatgaagtaaaacgatttgacgaaacgatttcagttaccgattcaaatggaattatgatacactttaaataaaaaaagaactgtttaagcgaaaaatgagcttaaacagttttttgatgcgataataagggaaaggtagattagattaattattttaatgtttacgttgcattgttttcttgaaaagccagttgcttgattggaaaagcgttaaagcaattaaaacgacgccaattccaagatttaaatacgaaagggctacagctgcgttatctggaaatgaattttgcacagtgatgaaaataataaagaaaccgctgtttgcacaaaacgcaatccaaaaccaagataaaccactaagtttaccaactacaaaagaaagtcctgagattattgctgctaaaacaattcctgtaagtatcattgacataaattccattttcatcgctcctttgtcataaatgaattattattaataataatgtaacataaatgaaatattttgtaaagaagttagaagaaaggagatacacagatgattgaattttttaaaacaacaaatgaaaaaatggagcaattatccgagttagaagatggttgctgggtgaaagtaaccgctccgacagaagatgaaattgagcaattaagtaaagaaatggatgtgccaaaaccttatatcttagatgcactcgattcagaggagcgctcgagaatagaattaaaacgagcagaacaagatgtaagacactccttagtgattgtcgactatccgtatgaatcggaggatgaacttggttacacaatgtacgaaacactgccaattggtatcgtattaacaagaaagtatctagtcactatctctttacgcgacttactaatattagaagatgttcgtacgatgaaactagaaacatacgatacgacgaatcataaacaatttttgttaaaattattgtatgctgtatcttattattacctcaaatacttaaatcaaatcatcaaacaaacaaataatttagaaatacagattaaacagtcgatgaaaaatgaacaactgtatgcgtttatggcggttcagaaaagtttagtattttttgcaactgcacttcaatcgaataaagcaatactcgataaaatggaagatgtggaacattttatgcaacaggaagataaccatgacctgcttagagatgttattattgaaaataaacaagcaatagcaatgacagatacatacacgcaaattattagtggcatgtcagatgtgttttcttctgtcatttcgaataatttgaatatcgtgatgaagtttttaacatcttttaccattattttatctttaccaactattgtggcgagtgtttacgggatgaatattaagttgccatttatgcacaatgagcacgcgtttgcattaattcttttatttacgctattaattacaacgggggtaacagtgattttttggcgtagaaaatacttttaatatatagaaaacgagggatgagcatggaaaaacaaacatacgaaaaattagcatactatacaatcaaagaaaaaattctcagcggaaagcttcatgttggtcaacatatttcagaagcgggtattgcaaaagaattatctattagtcgaactcctgtcagaaaagcaattgcggttttagtatccgaagaattaatcgaatacgaactgaaccggggggctattgttatcgaaagtagcatgagcgctggacgttttatcgaactccttgaaatggcagaaattctcgtcgtgcaaacaattgaaaaatgtaaaagtaaaaatttaacttataaaccagaacaaggcaatgaattactaaaagagatgagaatcattcaaaaagaagaaaatgtcgatgcttatctatctttgctgagtaaatggctgttacaatttgtcgcgcaactagctaacagttatgcagaagatattgtaaggaaaatgaagcgtgatttctttaataaagcacaaaaagatattaaaataataccagtgcttttggaagaagaaacgatggatacattagaacaactaactttttatatggtagaaaagaaatatgacttagcaaaagaggtaatgcaaaaattagtgaatttgtatattatccgtacatttagatagtatttctaaaatgatttgcttaaatacaggaggtgcttttgatgcggaaagtatacgaaatatttgttttagactggcgccgtctctttaaagcgcctttagctttattattagttattgcattaattattttgccatcattatatgcatggtttaatattgaggcactttgggatccttattccaatacatcaggaatcaaagtagctgtttcaattgatgatgaaggcgcagaagtagacgtaccgggaaaaaagcctcaacaagtgaacgttggggatcagcttaagaaaacccttgagaaaaataaaaaacttggttggacttttgttagtgaagaagaagcgaaaaaaggcgtaaaaagcggaaaatattatgcttcgattcatattccgaaaaatttctcagaggatatggtttcggttgtaagtgataacgtcaaaaaaccaacaattgattactcggttaatgaaaaaatcaatgctatcgcgccaaaaatgacagaaagcggagcaacaactattgtaaatcaaattagttccgagtttgtgggcacggtgagtaaggctgttttagaagagtttaataaagcaggaattgatcttgaaaacgagttaccgacaattagacgtttaaaaaccaaagtattccaagtacaagatgctttaccagaacttaaaaaaatgggtgctgaggccgtcaaaattgaagccaaattacctgaactaaaaacgaaagcaaatcaggttgtcgaactaaatgaaaaaatcccagaactaaataaagcgacagaaaacgttttattagtagaagaacagctaccaaaaatcgatcaacttggtcaagatattcttgtgctccaaaagaaaatcccagaaatcaaacaaatcgcgcagtcagtaaaagaagtagatgaaaacttcggaacgatcaaaaaaacagtcaatgacgcggtgaatgaatctggtaaggcgcttgatgtgattgatacagcgacagcagcgattccaacagttgaaaaaatcgcccaaaatggtagtggatatgtcgataaagtatccgattttgcagacgaaattaataagtcatttgatacgttagcacctgctattaaacaaaacttaacgctaatgaagcaaatggcagataatatttaccaagtaactgaagcaatcaaaaatggttctatcaactctgaacaggcgatttccgaactgaagaaaatggaaaacgatattgattccttacaacaaatgattacaaaacaaactgcaactttggaaagcttaaatgaaactttaccgaataagccgtttaccgatttaattgcaaacttaaaaacgattaatagccaactaggcgcacaaaagcaaacaatcacaaaagtacgcacagcactagaaaatggtgaacaaccagctgaggaacttttaaatcaattgaatgaacaagccaaaaatgttagcgcaaaattagaccaaattttagcaaactatgattcggaaattgttccagcaatcaaaaccggcttaaatcaaattcaaggagacttaaaagacagccaaaaattactacaaaacttgcaagcaaaaatcccagaaatcactcaagtattgaaagattccagagaaacactgcaaactgggcaaacgtatttaaaagaatttcaagagcgactgccagaaatccagaaaactttggatgaagcaactaaggttatcaatacgaaactagatacaattatcgcaggtattaacgaagcagctgatttttatcaaaatgattatccaaacgtaaaagctaatatcaaaaaagcagccaacttcattcgcgatgatttaccaggactcgaaaaagaaataaatcaagcatccaatctgatccaagaaaaaatgccagagttcgaaaaagccgttaaaatcgcagcaaatctttccagagaagaactgccagaatttgaaaaagcaattaataatgccgccaataaaattaccgatttcgataaaaattacgatttgcaaagtattattaaaatgctaagaaatgatgccgataaagatagttcctttattgcgaacccggttaatttaaaagaaacaagttactacccgattccaaactacggctcggcaagctcgccattttatacagcactttgtttatgggttggggcgctcttgcttatctcattactacgtgttgatgtagaggtgccagcggggattttcagccattaccatcgttattttggccgattattaacgttcttatccatcgggttaatgcaagcacttattgttacgctcgggaatatattcttgctcggtgtttccatcgctgaacccttactccacgtgctctttagcatgtttatcagcgtggtctttatgacgattgtctacacactcgtttctttatttaataacgtcggaaaaggtattgcgatcatcttgttagtactacaaatttcaggagcgggcgggaacttcccaattcaagtctcaccaccatttttccaagcgatttatccgttcttgccgttcacttatgccgttagtttaatccgagaaagtgtaggcggactctatatgccaactgtttggattgacatgagtgttcttgctggatttgccattttgttcattgcattaggtttgttactcaaaaaaccgctcgacaaagtagtaccaaaactatccgaaaaagcaaaacgaagcaagcttattcactaaaaatatttctatgatataattactagcgaataggggggcagacttgatggtaaataaatataaaacgttggataaaatggtctataatttacttcttgaaaagattaaaaaaggcgatttagtccgtaatgagcatctcgctgaagaaaaacttgccgctgaattcggagttagccggtccccacttcgaaaagcgattgctactcttacagctcaaggcattgtgagctatcacgaaaatagtggagcagttttaaacgatgtgctcattggttcagaccgatacgtgcaattaatggataccatcgatattttagttgatgcagcaatagcaaaagtagggcacttcagtttagtaatggatatagaaaaactacacgaacgtttacaagagatggaacgattttcttatttaacggatgttgaaagttattttgatgcacatcatcgtttcattctttgcttaattagttttgctgaaaatccatatcaagtgaagattgcaaaagatattttctttcaaatggttcatttttcggatggtattaatatttttaaatcagtcgaaattagagaatggaccaataaaaaaagcagccaaatatatgagctactcgcacaagataaaaccgaaatggcaaggaagacaattaaatcaatgtttgctgaacttacaattcaagcgtatcgttaaaagagctgtcacaaaagtgacagctctttttgatataaattaaacccattcttctcaccagaaaacataaatccataacgcagatacatttgattaagggcttcgtttgttttgatgcagtctaaccgaacaaacggaacagacatgttaagtgccaattgttcagcaaaactaatcatttgtttacttaaagaaatgccactaaaatcccttgataccattattcggtgtaagtaataagctgattgttcatgcctatcaccccataaatctgtatcccagtcactcggcgttttcctaataatcattactccagctagttttccatcagccgcttcaaaaagtgcaacttcgctaagctcaatccgttgttcaatattatgaacatcaaatccatgtaaaatatcactccactgggtcgaacccgattcttttaaccagcgcgcagtatttaccattaactcatttattgctgaacgatcatttggcaaagcaaagcggactagaaattccagtccgccagctgttattttattttggttcattattgtcttttggagcctcaggagcttctggagtctcaggagtttctggtacttctttcgtttcaggagcttctggaacttctggtgtttcgggttctatcgttgtttcaggagttactggagcttctggttctacttttgtttcaggtgctttcggaacttctggtgtttcaggttctacctttgtttcaggtccaaatccctctggatgagtatcttctacaaaaggatcagtttctcttgtaccaaatggatcaatttcttcttctacaataactgtttcttcggtgtaagttccttcgcttgctgcatataaatcatcatagaatacagcgatagaagtgattagatacggataaacataaagtgaaataccaagtgtaagtaaccaagaagctagtattaataccagtccaccaaatgtagctccagcagcaagtgctgtaattacttcagcaggatcagcagtataagaagtagtagccataccaccagcaacgattacagtacctgcaattgctacggctaaaggaattaaataccaaagtaagaatgtaagggaaagaccaaatagtctacctttatgcccgttcatcatatggcggctttctgtaatagcatcaagtgctgaaatattaggattatcgcgtaaaataaagaatgtttgtgaataggaatatgttttaataattcctggtacgattagtaataagctccataagaatgtgaaaatagaaatgagcaagtaagctaaaaacgtacgtccaaattgtttaaaaccactaaacatataagcaacatctggttgttcacggcggctaattgctaagtatacccaagcaacccccgtataaagtggtccagttaatagaaatagggcaatccagccaacaacaggaatccaaccaagtacccctccgccaacggtttcaattaaccatgcaagaacaaatatcccaatggcaataccccagttgccacgtagcgactctttagctgtctgttttacttgtgaaatagtcatcataatgaaaactcctttttaatttatttttaagtataatagcaaaaatacctacttttaaaatagcatacttttaggcactaatacagcaatatggagcgggataaaaaaatgtttaaaataggattaattttctagcaataggggaaaagtaacgttatatgatatgaataatttggaggtggcgcatatggcccatgagagtttaagagaattagaagatcgattaattgaattgcgacaacaatatcaagaagcgttaagcgaaacacgggagtttgaagacccgcaacttcaaaatggaccaattaatgctgctgaagtaagattaagtgcattacgtcacgaaatcgctgaagtagagaagaaaattaaaaaagtagaaggcaataccaaataaggaaaagacgtccttttgctaatgtcatgttagcgaaagggcgtttcttttacgtaggtttggaggtataacgatgaagccaatttttgctgtaggagatgtgcacggggaaattacgcttttagatgagttgttagaaaactggaataaagagcaagaacggcttttatttgtaggtgatttaattgatcgcggtgaaaatccagcggcggtacttaggcgtgtgaaagagctcgcggacgaaaccgaagtgatagtcttaaaaggcaatcatgagcaaatgttgctcgattttttagataacccttctgaaaaaatgcattattatttgagccaaggtgggatggaaacaatccaatctctaatcgctgactcattagataaaaaaatgacgccagaaggattagctaaacgcgtacaggaagaagcttctgaactcattgatttcatccgccatttgccactttattatgaagaaggtaaatatgtatttgtccatgcgggagtagatttttctaaaccaaactggcatgataccgaggagcgcgatttcttctggattcgcgaaccatttttattcgggaaaaataaaaccgggaaagtctttatttttggacatactccggtgcaaaatttacatagcgatggaagtgcaagaatatgggtctctgaagatagaacccggcttgatattgatggtggcgccgtttttggcggcgaacttcacggagtcgtcgttgaagaaaatgtaattacaaaaagtttttccgtaaaaaaataagcatcgaatgggctgtttttaagagctcatttgatgcttttttgtttaataatacggcgccataaataagtaaacgagtacgccagttaagctgacatatagccaaattggcatagtccaacgaacgatttttttgtgtttctcaatttgcattgtccagccccacacaagtgcaaatagcgctagtggaacaacgattgctgctaagaaactatgtgtaattaaaatgaaaaagtagattggtcggataatcccagttccgccaaacgtagaagtttctgctgagagataatggaacgttaagtaagttactaagaagaataaagttgatgtaaatgctgctaaaatgaagccacgatgcattttaatgtttttcttttttataatcgcccaaagtgcaataactaaaaatacaaaggtaaaactattaaagatggcgttcattcgcgggaagatagtaatgtcgaaatgtactgctccttgatacccaatcggtgagaagaagagtagtaaaatcactacaaccgcaacaaatgaaataatcattatcggccaaaaatagtttttgtctgatgtcggttttgtaagtttttctttattgtgttccatgaaaaaaatagccccctaaatataaaaaattgctgtacttctttcattatacatgacgaacatatcggatgctaaagattgaacttttgagttataatgggttaggaaagggtgtttctaatgtcgattattgcgcgagaactaacaaaagcggaagaagcagaaattatccgtttaaaagaagagggcgaagtgatgctcgaaactgacggaactccagaagagcgaatcgaaaaaattgccaaatatttaaaagatacctcaccggacttcgatttggcggaggaacttggttatattttagggtctctgtatggagaggctgtccgtgaaaagtatcagtggagatggctgtttatttctgaaaatgatgtagaaggatatgcaattacatcaaaagaacatggttatacattaatggcgcatgattattttatgcaagtaattgttcgaaataaaccggataatagtaaaaaattatttgaattaatgcctgatatgacaggaaataaggacggattccgagttattggatgatggaaaagtacgttattaaaatagaaatagattattagagagaaaacattcacgtgttttctctttttttatcgtttattttttattttctttcaaaattaaataatagtcacattttagacataataacgaggtgattgttcactgtttagacacaatcgccgggaaacaagtgatactaatggacttctgagaaaaatcgccatgtataatgtaatttagatggtttattttatgattctgcaactaaaaaaactgacatctaaagaagaaaggaacggatatatgataaacaaacaacatttttataaagtaattcaggcttttattggggttcttttaatagggagtgtttttatatggcttgggtcaaataatgatgtaaatgctgaagaacagagcattaccgaacctacaccaataaacgaaatttttcccgatgctaaattagcagaagtaatgagaaactatcttagcaagacgaatgtcactgatactgttacgcaagaagaactgaataacataactattgtaggtgcaacttcaactgggattgagtcgcttgagggaatacaatatctgccaaatgtgacgacttttaactttaacggagaaaaaatacaggatattagctttttatcaaattctacaaagttagagaatctggacctgtcagggaatccaataaaagattttagtccgattgcaaacctaacaaaattgcacactcttaatttaatgaattgtgagataagcgacattagttttatcacaaatttaaccgagttgaaaagcctttatcttagtaacaatcgcataactaacataagcccattagctaatttaactaaattagactatttaattattgaaaataaccaaattactgatttaactccgcttaaaaatatgaaaaacctcaataatttagttataagtggaaatcagataaatgacatcacaacaattgctgaattaacgagtttgcagaatttatctattagtgacaatcaaattgtggatattagcccattagctaatttaaacaacctaaattctttagctatccataagaataatattgttgatacaagtccattggctaatttgacgcaattaaagtttataaacatacgagataatcagatagatgatattaccggattaactaatctaactaatttaaccaatctacatttaggtggaaatgaaatatcagatctaacgccacttgcgaatttgactaatttaaaccttttggatttaactaataaccaaataagtgaggttatacctttagctaatttaacgaatctatccaatctttggttaaatggaaacaatataatcgatattagtccattgaaagatttaaagggtttaaaaaatttaagtttgtctgatcagcgaatacagaaaaatcctgagttgtttaaaaccaattttaccttaactaacaatataaaagatttagacggtggattagttgagataacagatattagtcataatgggacctacgataacccgattgttacttgggagttgcctagatatgtaaatgaaattagttataaatatacacaacatgtgcagattggtaattctaagacggattacgatgtgacggtcagacaacctttaagcttaccatcgcatactgtgaactttatagtagacgatgttttaaaaacaagtttagaagtaaaagaagaagcgttgattacacaaccagccgcaccgaaaaaagcagggtacacatttacgggatggtatgacgcgaaaacaggcggagacaaatgggattttgaaacagctgaaatgccgagaaatgatatgactttatatgcgcagtttagcgaaaatgaagttatcccagttgatgaagacgttgatcttattgttgaagaaagcggaccagtgcaagaaagtaatgatgacgtaccaccagttactgaaccgacaaaaaatatcgtaatgcttccgaaaacaggagacagtaacaacatgttatttgttggattaggtttgttattgttcggaacaggggttgttattagtaaaaaactccgctaaaacaaggaacaattatttaaagagaaagctttattgctttctcttttttgttcactttgaatggttagcgataatagatattagcaaaatattatgctacagtgaaagaattaataggctagttttagtgagaggtgataacggttgaatataaataagcaaaaagtgcaggttttaaataatttagttgagctttatggttatcaagattggtgggaagatgacaatcgtcttgctgactggctttcgatgatattaattcagcgtacgacagagaaaaatgccaaccaagctttagccaatctcgcaccttatttagatttagatagtttaaccaagatggatacggtgcaacttgaagagttaatctatccagcaggtttttataagcaaaaaagtctttacattaaagcacttattgagtggttcgttggtcacggtgctagtttggataaatttaagtcttattcaacagaagatttgcgcaaagaactactaggtattaaaggcgtcggggaagaaacggccgatgcaatgttgctatatatttttgaacgtaatgtttttattgctgatttatatgccagacgactatttactagattgggctttggtgaatataaaacgtacgagcaaatgcgtgaagaatttatgccgataaccgaaaatattccacataaactatgtaaagaatggcactcagtcattgatgttcacgggaagcattttgggaaagacaaaagtatgaatgaatcgtggttgctagaaagctagctcttaacaatatctataccttttaacctgataaactgatctaataaaatttcatataaataagcaatttcttcaaaacgaaggtcattcataatttgaatggctttttttgcttgattgtaaccttcttggatatgattgttttgcattttgattaagccttttaaaaaatgggagatattgcggtaaaaggcgctttcgttataaatgcataaagagtctagcaggataatgagtttattagcagaggatagttgaccgcgcgaaataaacatttcaatcgtattaattaaaagtgtacataaaacacgtctggcccggtcgtagtttttataaggatgaatcgccttaatgacctgatttaaaaattgaatttgtaaatcttcttcaaaaaaatagatggagttagcgcaaatcttgagttcttcaagtgtccacgtatcaatcgaaaacaaatacttttgaatagtgcatttatctttagatgtaataacatctactgtaaattcatgatatttaaaaagatgtttgactaatttaatttgcgaacgaacaaatgctttccatacctcaactaattcgccattatgtttagaaagctcgctatataatagttccaaactcgcaaggtcgtatatatttcctcgctcttgattcatgcataaataattattctcagctgataccgacaattctctgtggatataaaagaactcatccaagtccatattcatccgttttaaaattttttcaaataatgttagtgtgatgtcgtgctttcctttttcaaattcgatagcgaaggatttggaaatgatattatcgtataaatctttttgatgtattccttttgaagtgcgaatatctctcactgtttttccatacccgaccattcaagttactccttctgtttaaaaatttagatgagggctgcatctaagaggtgtgccaaggagtttaacagccattttacttttaaatcgtagcatagaaaattgggcggaagaagtcctatttttaggactttatgaaaaaatgttagtaaaacttgatatattagaaatgaaaaaaacagatctatttgcatctttttttatgatatttaacaagagaaagaaggaagttttatggctaaagcaaaatatgacgagaattttaaaaaaagtttggttgctttatatcgcagagggaaaacgaagcatagtatctgtcaggaatttagtgtccctaattcaacttttggaaaatgggtaaaaaaatttaataatgatgataatattgaatcgaacgaaatcttaaatatcttgcaagcgcaggaacttaaaaaacaacgagtactacttgaggaagagttatctattttgacagaagcgattgcggtttttgaaaatccgcctagtaacgattgaattttgtgttgagatgaaagtggttataccgaaatcaagaaaagcagttattctcttaattttaaatagaggatagctgttttttttatttttaaatagaaaatgttgtctttgggatactttttgttgatttttagtcacatttcagatggaattgcttatattaatggactgaaacggacctcattgtaggtataattgttcttagttagatacaaggatacgcaagaaaacgggggaaattgaggcagataaaccatactacaaaggaggagatgtatttgaagaaaattttacatattgttatcgcgcttagtgtaatttgttcgataattttagtgccggtggattggcccgcaaaagcagacggtaataataagagagatgatctcattaaatctgtcggtttttataaatcagatggtcaaaacgtaatggcgaaggaaaactataatgaaaagctcaattattttttagaggtagcttttggagggaattctttccaaaaaggggactactttaatattactttatcatctgatactttactctatacagagaaagcctatgatttgaaagtggatgttgacccaacagcggtaactaacgaacaagtagttggtaaggttactgtagaaaaaattaatggctcgcccacattgcactttgtttttacagaagattcagagtccttttttatgaaaaactttgatgcgaattttaaaatacaggtgatgccggctcatggcgataaaaacgttattaacctttcttacagtggagctgcgaaaaattttaaaaatattgggacgagcagtgtagaattgaacgtaaatatggcaagtgactggccaccagttggaataaaagattttactaaaaaaagcggtgatttataccatgcgattttagtatatgaaaagcctagtagcaaagtgaattacgaaacagaaattttagtatcgtatccgctttttgaaaaacgcattccgcttggaaatgtgcaaaatattaaaattgaagtttgggacgaagcgaaggagatttatagaattggtgttgcaggggtggattacggaacgattacatacgatgttggaactccatttgtaggcggtcctattttccaaatgaattgtactattccgttcaaaggtatttctactaaaactcgtgttagtttcgatattgatacgaatgtggacgggaaacctggaacaacagatccatacttggttagtctttcttctgtatcatcggctacaaagtcattagaattctatccagtgaataatgctgatacgaaaatgacagctgctttttttgggaaagtaacgacgcgttttgaggatgagttaggcaatccggttacttttaatgattatagtacggtaacaacaccgggaaaagtcaatcaagatggtaaatttgaaatagcggaaccttttttacataattccgtgcaaaacgtggataaacatgcctatgattcccttttgaatactaataaatataaattattagaggtaacttctcctaataaactatctgaaacagcggataatttaagtattcaaataaagcaaggctaccaaaatgatgttttatacaaaataaaagcactccaaaaacctgtcattagcgcacttcctgaaatcgaatatagtaaaacagtaaaccggacaatggaagagtttttggaagatgtggaagcaaaaacagatattccagctgatataaaatgtgatttaacgaatgtgaaatggggtgttccgggcgactatccagttcttattaccgcggtaaatgaggataatcaagcagcagacccagttcctgtaacgattaagatttccaaaaatcccgcaccggttataacggtagacccagaaataatctatgataaaacagtgacgaaagatgagagcacattactaaatgaagtaaatgcgcgaacaaatgatggttcgacgattacttctaatataaacgacaaagtaaaatggggcgtgccaggcgattatgaagttacgttgaatgcggtaaatgaagacggcgtagcagcggaagcgaaaacatttatcgttcgtattttaaaaagtccagcgccaattatcgctgttgatcctgaaataacgtacccgaaaacagtaactaaaacggaagctgaactccttcaagcagtaaatgcgcaaacaaatgatggttcaccgcttgtttctgatatgaatgacaaagtaaaatggggcgtgccaggcgattatgaagttacgttgaacgctgtaaatgaagatggcgtggcagcggaagcgaaaacatttatcgtccgtattttaaaaagtccagcgccaattatcactgtggatccagaagtaagctatgattccgcgataattaaaaatgagacagagctattaaaagaagtccgcgcaaagactaatgataactcagctattacttccgatgctccagataaagtgaaatggcaaacgccgggaagctatactgtgacactgaatgcggtaaatgaagatggcatcccagctgatccagtaacgtttatcgtgcatattgtagaagcgaaaaaagcgccaattgttatagaagaaaatccagctgatacgcctactaagcctagtaagcaaaaacccaaagagaaaattgttatcaagaaaacaacgaaactcccgaggacaggggatacacaatcgaaagctatcttaggtggggttctttgtttgggagcatggttcttagttagaaagaaatagcaagaacaaaaaaacttaagtgaattcacttaagtttttttggagtaatttattaaactttatcatatgcttctaaggcaacaggtagggcgcttataacagtatttcctacagccggtaaaccaacgagaatggcgctaataatctcctcacgcgtcgcaccgtttgtctttgccattgttacatggaaaggtagtccgctttctaggcgggtggcggccataacggcaatataagctagttcttctgtttttttatcgagtttacttgcggtatctagtttatgtacggtttccatccaggcagagtgtacttcgggagcttcttttgcaaatacctcaaatgatttacttactttcatcgaactcatctcctaacttttattataataaaaaaccgcccaaacaatggacggtttttgtattatctattttcggctttattataagcaccatgccaaacaggaccgatgaattcgtttagggcaaatccacctttgatagctgctgtgacaaagtcttttgcttttgcgacagcttcttcaaccgttaaaccttttgcaagtccggctgtgatagcggctgcgaaagtacaacccgcgccgtgattgtggcttggagaaattttttctacttcataaacagtaaattctttaccatcgtatagtaaatcaattgctttatcgctttctagggcttttccgcctttgataactacgtatttagcacctaattcgatgatttttttcgctgcttttttcatatcatctaatgtagttaatttgccaagaccggataattggcctgcttcgaataggtttggtgttgtgattgttgcttttggaagcagtaggtcgcggatagcttcggcgttttctggttggattaattcgtcttcgcctttacaaaccataactgggtcgattacgacattttttaaatcatatttatcgatggcttcacgagttgctttaatgatgtcgattgaaccaagcattcctgttttcattgcgtcaacagggccgccagaaaggattgtttttagttgttcacgaacaagttgcgcatcaattggagtaacgccgtgcgcccagttgttgtctggatccattgtaacaatagttgtgattgcgctaaaaccgtatgtgccgtattcttcgaacgtttttaagtcagcttgtaagccagctccaccacttgaatcagatcctgcaatagttaatgtttttttgattgtcattagtgtttcctcctaaaaataaactttagtcatttgtttctaacattttataaatggctgctgcaactccgtgttcatcattggaaagtgttacatgttctgctaattctttgacttcttcttcgccgttacccatggctacactatacccagccatttttaacatcgaaatatcattcatattatctccaattgcaaaagtttcatcaagtgtaacgcctaatttttctacataatattgtaaagaaatacctttttgtgcttcgcggtgcgtgatttcaatattatcggaaaaagaagatgttacagatagttcggattctttttctaatttttgtttcgcttttgcaagaatgtctttatcagaagagaaggaaataaatttaagaatcgttaaatctttattgcctaaaatacgttctacatcaggaatttcgtgaacgtcttttgattcaaagcgttcttctactttatccataatagtttctgctggaacgtctgggtggatacgtttgtgcatttcaatcataaattctttgccacgagctttatctgttgtgatcggacccatgtcagtgaagaattctgtatacattccaagttctgtcaaggtattgtaagtgttgcgcgctaagtttctatcaatcggatgttgcaaaataattttgccgtgttcatcgcgaatttccgcaccgttcatacaaatagctggtgcatataaattagctttattaattaaccccattgcatcgtcatacatacgcccagtacaaagaacgaaatgaattcctttggcgcgggctttttcgattgcctcgacgttttcttgtgcaatctcgatatcagagttaagtaatgtgccatccatgtctgaagcaataactttaatcataatattaaattcctccccaattttacctacctcactagaatatcatttttttaagaaaaatgcacaaaaggtagctgcgcgtagttttttgggagatgcgattactttactatatttctgtctttcatttggttataatggataagaataaaacgtggattggatgtgtcaggatgaagacagaactagaaaagatgattgcaggagaaatgtataatcctagcgacagagaacttgtacacggaagaagtcgtgcgcgtaagttctgcagagagattaacgatacaatggattctgagtctcgtaaaagcgtgcttaagcgtctgttcggcggaacaaaagaaaatgtttatgtcgaaccagattttcgcgtagattatggttctaatatttatgttggcgaaaatttctacgctaattttgattgtgtgattttagacgtttgtgaagtacatattggtgataattgtatgatggcgccaggtgttcatatttatacggcaacgcatccccttgatccagtagaacgtaatagtgggctagagcttggtaaaccagttgaaattggcgataatgtttggattggtggtcgggcaattattaatccgggcgtgaaacttggaaataatgtcgtggttgcttcaggcgcagttgtaacgaaaagcttccccgataatgtcgtcgttgccggtaacccagcgcgcgttattaaaacaattgaggttgaggaaaaatgattatttcagattcaaagatttttgaacaaatggaaagtgaattagcgaaagcacgagcagcaacgacaaaagcaagccaagataagcatttgcatggcttgatgcttcttgttcaacttgcaaaaacgggcgacgaaagaagcgaagaagtgacgaatgtctcaattccaacttctgaaccagctcaaatcacaagtatggacgggaagaaaatagagttagaagacggcgcgaatggagactcgttgcttgatttttagggggtaactatgaagaaaacaattattactggagccatttttgcagggttagcagttttacttggagcttttggggcgcatgctttaaaagacgtacttggaagttatgcaagtacttgggaaaccggcgttcagtatcaaatgtttcacgcagttggcattttaatcgttgggatattaatggaaaaacaagctagccggctttacgcttgggcagcaattttattttcaatcggaattgtctttttctcgggtagtttatatgtgttaagtatttccaaagtatccattttaggtgcgattacgcctatcggtggcgtttgctttgtcgtcggttggttcttgcttattttaggggtatcaagaagaacgatgagcagatattaattaaaaaatgatcgtcttttcgcactattttacgtggaagacgattgttttttcttattagcgaataagtgctaaaataaaggaatcataatttataaggagacagcaattacatgacttatgcacttgaaataaaagggttaagaaaaatttattccactggagtcgaagcgttacgcggtgttgatttaacggtagaagaaggggacttttatgcactgcttggtcctaatggtgccggaaaatccacgactatcggcattatcacctcacttgtcaataaaacatcaggtgaagtgagcgtttttggctatgatttagatacagatattgttcgggcaaaacagcaaatcggtcttgtgccgcaagaattcaacttcaatccattcgaaacggttcagcaaatcgttgttaaccaagctggatactacggtgtttctcgtaaggaagccattaaacgtagtgagaaatatttaaagcaatcgaatttgtgggagaaacggaatgaacgtgcgcggatgctttcaggtgggatgaaacgtcgcttgatgattgcacgtgctcttatgcatgaaccgaagttgctcattttagatgaaccaactgctggagtagatattgagcttagacgtgagatgtggacgtttttaagagagttgaacgaaagtggtacgacgattattttgacgacgcattatttagaagaagcggagatgctttgtcgtaatatcggtattattcaatctggggagttgattgaaaataccagcatgaaatcactactttctaaattacagtttgaaacgtttatttttgatttagaaccgtatgagggaactttcgaaattacgggctataatcatgtttttgaagataaacaaacgttatctgttgaggtcgaacgaaatcaaggggtcaatcatatctttgaacaattaagcgaacacggcattaaagtgctttcaatgcgtaataaatcgaatcgcctggaagaactatttttgaaaattacagaagaaaaacatcaagtgggggagaaacatgtttaatctatattttacagcgttaaaaagtttagcggcgaaagaaaccaaccgctatatgcgaatttgggtgcagacactcgtgccgccagtcattacaacttcgctttactttattatttttgggaaaatgattggtagtcggattggtgatatgaacggtttttcctatatggaatatatcgttcctgggctgattatgatgtctgttattacgagttcttacgccaacgtatcgtcttcctttttctcgcagaagtttcagaaaaatattgaagaaattcttgttgcgccagtgccaacacatattattatttggggctttttgattggtgggattggtagaagtgttttagttggagcacttgttacgcttatttcgatggtgtttgtgccgattcacattcattcttggacgattggtattattacctttttaatgacagcaattttattttcacttgcgggacttattaatgggattttcgctagatcatttgacgatgtatccattgttccaacttttgtattacaaccgttaacgtatctaggtggcgtattttacgcgatttcgatgttaccgccaatctggcaagcgatttctaaagtgaacccgattgtctatatgatttccggattccgctacggtttcctaggagttacagatgtaccagtagtaatttctttatccattcttgttgtatttagtgtcgttctgtactcgatttgttggtatttaatcaataaaggacgaggacttagaagttaatagaaattgtttaaagagagagcgggtttccgttctcttttttttcatgtttactacaattctttttcaatttgatgttaaacgttttagcgtaaaacaggagggaaaacataaagtaatggggggaatgaaaatgggaaataaaaaagtgaagcgaaaacttagcgctaatatttggtggatacttatattggccattttaataattttcgtagcctatctagtaatgggttacgttgcaaaaatataggaggttttatgatgaataaagaaaatccattaaacaaataccatacgggaaaatttgaaaaacaacggcaagattatccaggtcttcaaagtaaaatgacacctgtgccagatacgggcgaatcaagttatcaaggtgcgaacaaattaaccggaaaaaaagcctttgtaacagggggcgactcgggaattggtcgagctgcggttattgcctacgctagagaaggtgctgatgtcgcgataaattatcatccggatgaagaagtagatgcacaggaagttaaagcgattgttgaggaagctggacagaaatgcgtcttactaccaggtgatttacgaaaaaaaggtttagcgaaagagttagtgaaaaaagcatataacgagttaggtggactagatattctagtgctaaatgctggactacaacaatatcaattagatattcaaaaacttccagctgaacaattacgtgacacatttgaagtgaatgttttctctgttgtgttcgcaattcaagaagcacttaattacttaaaagcaggagcaagtatcattttaacgtcctccattcaaggcgttaaaccaagcgctcatctcgttgactatgcaatgacaaaaagtagtttgatttcattaacgaaaagtttagctgctcaactaggtgaaaaaggaattcgcattaatgcagttgcaccaggtccaatttggacggcgctacaaatttctggggggcaaccacaagatagtattccagaatttggtcaagatcagccacttggacgagcaggccaaccagcggaacttgcgagcgcttatgtacttctagcctcagatgaagcaagttatacgacgggccaagtatacggaattactggcggtgctcctattaattaaaagcgaggtgagaggtcgtgccgtggacaaaaaatgaatatcctgattcgtggaaaaatctaagaaagaccgaacgcgaaaaggcaattgaaatcggcaacgcgctattaaaagatggctactcagaaagccgcgccatcccaattgccacttcaaaagcagaagaatggtataaaaatcataaggaatcgtaatgttaaactaaaaaaacacttgaaacgctaggctttaagtctactgtttcaagtgttttaattttgataaaagaagtgtactatttaaattaagagagatgatgacaacgaggaggaacttttatgaataaaagaagatggattttcagcactgtggttgcagctttcctattgattatcggaggatatttaatttatcaacagatgaaaccaaaaccgttcaccgaagtagtggcagaagctaaaatcgacggttatgagagtggggatgaactagaaaacgctagtaatgtcatcgtaacaggtcaactagaaaagcgcggagattcaataatagagcgagcttcagatgatgctgtgataggtgtatctagaatgtccacttttaaaatagctcaagttttaaaaaatgaaacgaatgacaatttagcaaaagaaatgataatacctgtttatgaaaatgaaggttacgatgccaaaacgaatacgacataccatatcgctggctatacaaaaatggaaaaagaagaaaaatacctgttgctgttgcaaaaagattcagaaggtgactattacgtcccgacagcagttattttcggaaaaataaatctcgatcctaataaaagaaatgaattatttcctaaaaacagcgaaacagaagcagcagtcaatcaagtacaagccgaagttttaaaaaatcttgaaaatgaaatcgagcgagaagacaaataattttgttctgttgcattttagttaaattcgtcatctaattttaatacaaaaaaagggtttggattgggtgagacgggtattatataaccataagcaatgacaatgccattactttttctcccttttttgtagtggattgtctttacttaccttaaactcccttttatacttttagcggttgttagcagccactaggagtattttttttggaaatatatttgctatgttgaggggcagaaaagtgtagtagataaaatcttctcagaattgagtggaataaagaactaaaagtacattgaacacgaatagaaaaactgaatattaatcttaatactatttaccaagaatacatggaacacttaagctttaagaattgctaacaaattaataagaactagtaataaaaacacctcggacaagggaaagttcgaggtgtttttgcatttactaatatttgtaaatgccactgggaattcaagtaaacaaaacatatgggtgtttgggaaatcaccacttcaaaaatatatcattgcttgaatctaatgggctgcaatgtagtataaatcacacactaaaagaaccttaacggaatcaataataaatacgttttattccaaaatgtactagacataaaatgtatttctgtatttcttgcagtgtatcatttataacactaaataataaccaatcataaataccatgttactatgcgtttgtgcataattcattacaaaataagtaggttctattctacaagtaaaagcaaaataaactagagagcgaggggaaaagatgaagaaatggttgtttgtttttttatgtgtttgttttcttagccaatgtttaagcagaacagtatttgcggaagagtctgatcaaaagattgcctatttataccaaaaagggatagcagagggaaagatagcgagtaaacaatatccttatgatgcgtttaaagaaaattatgaaacaaaccaggttacctattcagcactgaaagatgaatttaatacaagtgattcttatgacgaatggttttctgaaagttataattatggtgcttttcctgatggagaggggcatgcgaattctgagttgaaaatagaacaacgaagtactacttctaacggaaacaggttgaaagcagcaatccaaaaaggagacatactaatagttggtggtggagtcgggcatgcagcaattgcaacaactgataattatattttagaaatgtctgggagccaaaattttgcaagttggttcataggtgggatttcaaataataaccaccaattcacaaaacaaaactggatttttggtacatccaatgaacaaggtgcttcatctgctccacacattgcgaaatggattcaattatggcgaatgccaaaccaagcgatggctaagcagtgtgcagactatgcagacgccaaattttggagtagtacacatagttatactaaaaatcgccatattacttataggcttacttctggaacactcacaacggatcctaattactgctcgaaaatggtattccaatccttttactttggaagcggatctgcaaatgtaatacaaggattttctgcggctttaacaagtattcttccaaacgctttacctaatctatttacgaataattttaaaccttataaagttggaacctattaaatatcataggtaaataattggaaagagtgataaaaatgaacaaaaatataggaagaactacagagttttgtttaggcttatgtggggggatatttggaattttagcggcaactactatgttgggatttacgataccagatataggtgatatagattttagttattggttgttatccattttattaacgagcatattttccatttctggagtagtaggttctttgtttgttcgtaagcaccatctacttggaggtgttttaatgctcggtgctgcaatcggtggagtactgtcacaaaatatgttttttattatgtatttagcttttccactcctcttgattggtggattagtagcacttattcgagggggagagtttttaaaactatttagtatgtggtggttttatatcgttttagcattatctatctttgttccacttttacttttccggggatattactgagaagtggaggaaagaaaatatgaataaaagatattatactgctctaatggttttatcgtgttttaatattctctggttgttgtcatttattttcgctacaggtagggggattggcattaaactagatgataatcaattaccgggctatataattattggtttatgtttgtgtatacttacttatgcgtattttgtaaatcgtatacagcttcgtaaaataataattgctagtttagccttattagacattttgtttatgtttctagcatgggagaaccaaaacataattaattttaatgagggaatgtttgtatttattattcctatctattttttgttatttatatgtattttttgcataattgatttttatttaagtttaaagaggtgatttaagtttgagtaattttaacatactgggaacattgatgttaatagctgttttaactttttagtcctttttccactcaataaaagaatatatgtttaaaaaaatgtactattagatgaaggctatttttagttgtggaacatgcgatgttacagaggttagaggtacacagttgaggaaataaatgggtttattatagcaagtgaatacttaaaatattttgaaataaaacaagtgcttttgttagtgagccttttttatgcaaaagaagaaaagaaaacaacttagtaaaagatagtaataaaaacacctcggacaagggaaagttcgaggtgttcggcatttactgatatttataaatgccactggggattttctaagtgaacaaagatatggatatttgggaaagcatccactttcagaatttatcacagatagaggcgtttaaattgtaatgtagtataaatcatacaatgaaagacgttcttataaaaacggcattcatttatacataccactaattactttgaaagattaaattgtatctattttttaattaatttttaggaactacgagaagctttataatttaaaagcgttttattcgtggatttttaagaaatggatttttggccattagtgagttttaagacctgtgtcattagtcctaattttgtttgtgagttgaaatgtgtctattttatgaatcttttaattttaaccttgtgtaaaatacaagtggcatatatccttagtgctataactaaatttaattacacagggggaaatatggggtttttagaagcttataagtcattttggaagaattatgtgaattttagtggtcgtgcaccaggttctgcatattggtatgtagtggtttggaacctgatgattattgtacctcttcgtgttatggcagctatttttggcgcttcatcaatgatagatggggttggctttgctggaatcgtagttatgttctttcttgttggtctacggtggttgtactggttggctactatagtcccactaacgagccttattgtaagacgactacatgacactgggaaaagtggctatcttgctttccttgctttaattccagtcgttggatccattattattataatatttatgtgtcttgaaagtgatggaccaaaccaatatggagatgtctatcataaatcagaggtttaaaagaaaaacgagctaaaactaacacttaacttttttatagatttatatgtggattttatgaatatttatatgaaaagtttatttaagtaagtgcggacgtatattcttagaagaacagtaaatttttatacataggaggaaatatgggatttttagaagcttataaatcattttggaaaaattacgttaactttagtgggcgagctccgcggtcagcgtattggtatgtagtactttggaatgttattatttttgcagtattatactttttagcttttgtttttggcatttctatatttatggaaagtgctcttgggggaactggtattgcgagtagtggtggggcgctctttatgatggttcttgtattgctatatttactagcagtattacttcctacaattagcctgatggttcggcgtttacatgattcagggaaaagtggtttatacttattgcttgatttaattccgtttgttggtagcattattatgcttgtctttatgtgtcttgaaagtgatggaccaaaccaatacggtgatttagatagtgaatttgatatttaaatattaaaaacgagctagaaattaattctagctcgtttttttaatggattccttcgcttacaaggaaccaattcacttgatttgtattgataaagtaagttaagtcatatttcgttaactcgatacatttttcgttaaaaaggttttttaggtctgctttggataattcgtggatgctgatgttattaatttttgcgtcgtcatcaagacgaattgattcaccatttactgtataaatctcgatatacatcgtaacacccctttcataacttacatttgcttataattttctttgaaaacacctagttggttaagtgttacaacgagttgctgactgaaaagtggcagcgcttggatctggtctaagtcgcttgcataagcaaaatcagctacttgtagtactagtgtatggaacgagtctgtcattgtttcattttgttgttttaagtaggagttttcttgttccaactcttgatattttgtttgaagatcttgatattttttgtcgagttcttctttttgtactgcaagggaagagagtgagtagatgcttttaagtaagtcatatacgttattttcttcaccttgattttcgcttaaaagttgaacattgcttttgacgccggaaagtagatcgactagatttttttcgcgtgatttgtcgtagctgatttgttctttgatggaggttggcgctttaaattcagctggaacaacttttccgaaaatgttggttttttcttttttagtattcttttgtgtttttctttttctccctggcttgtatttcggaatatcttctacttggataagctctttttttagtttgtaataggtgttttgtagttggcttggtgtctttggaaaaatccgcaagtcgtttaggctaagcatttcagaaatatcaaggaccttcatatcttctaaaatagcaatttggtaacatgcagaaagtagttctaattcgatttttaaccaactaatattggaatgcatatatttttcgattccaccgtgttcttcaacggcttgataaaattcagtgagtaattggtagatttcttcggcagtttgttcgttaatgccagcttctgaagccatttttttaatttcagtagcagatgaattccccggctcatctacttgttttttgatttcttgaagtaattttcttatttctgatttaggcatacaatcacatacctctctatcctatagtattattgattttctgtttatttttataataacaatatatgttagttgtgtaaagggaacgcgagtaggtcaaaaggattgggtatgaagaacctttttttaagttaaatagaaaaatataaatcgaataatgagaagttttcctttgatacagctgttacgctggctgtttttttatttttacacacaatttcattttttaaaaaaagtatagattttttctggatttggtgtaaaattttatattgcagttacaaaaaacactttattgatatatattttgaaaaaatgatttatttttgtaatctgatgaagggagtgaaaggtgaatttaccttacttgaatggaatattttttatcacttttaaaaattattgtacttttagcagtacttgctggaatttcttattttttagttaagaaaaataagcaagcgaatcgcacgagaaaaagcgaaaatgacctaataaagttgaaagacactctcttaatctctcatcagttacgagcagttcttctggaggcagacggggaaaaggtgctggctattatttctaacaatgatattcgaacggtgtcattaaaaggaaataatatccaaaatgaggcacttttccgagaattacttttgaaagaggagactaaggaaaatgcgtaaaatagcttctagacgagtatttcaagtatcttttgttgttatttttgcaatttcattggttttcttttggcccggcgtgaatgttcatgcggagagttggcttgattctcttggtgtaaatgggacagacggggttaattctagtgttgccctctttgttttagtcacggttctttcgttgtctgcatcgattgtattaatgttcacacactttacttactgtattattgtcctcggcttaaccaggcaaggacttggtgcaactaacttaccgcccaatcaagtgcttgtagggctggcgttatttttatctttgtttatgatgcaacctttaattacagcttggtatgacgatgtatataagccttcgcaaaaagaagagtggagtgcgtcaaaagtttgggacgaaacacaaccacttctaacaaaatatgttgcagaaaatacatataagcatgatattaacatgatgttgaaagcagaaggagaagacccggttacaaaaaaagaagatgcacctcttatggccttaatgcctgcttttattttgacacagattacccaaggatttttaactgggatgtttatatacttggcgtttatttttatagatttaattgttagtacgctacttatgtatcttgggatgatgatggtgccgccgatgaccattagcttaccatttaagattcttgtttttattttcattggcggatatggattgattaccaacatgatttttcaaacaattcacttttaagggagtagcaaaatgaatttaacgccgattacgcaaatttttcaagattttttctatagtgggctggcgcttattttgccggtgtcgctcatttgtatcgtggtcgtgattgtggtagcgattttgatggcgatgatgcaaattcaagaccaatcgctgacgtttttaccgaagattattgcttttgtagtggcgctctttattcttggaccgtggatgtttgaacacatgacggatttatttgtaggaatcttttccaaattacccctgatgattagggtgtaaacatggagtttgaatttttccttgctgtagtgattgttttcagccgagttgccagttttttatttttctttccgcttttaaaaggacgtaacattccgaacagtgtcaaagttgtttttgggatggcgatctctattccagttgcgacaggggtcgatgtttctggtattacgacattacctgatttgctactccgggtaacgtctgaagtggtatttggattagcactggcgaaattggtggaaattattgcggtaattccaaaaatggccggttttatgattgattatgatttaggattttcgcaagtaaacttgattgacccttcttacgggacgcaaaactcgattactgctgcgattttagataccttctttgtcgtaatattcttgtcgcttcaaggcatggattacttaatttattacttaatgaaatcgtttgaatttacggcttcggtttcgattttatttgaaaaagggtttattgatttgctgctcgggacgcttggttttgcgctcgcatcagcggtttcgattgcacttccgattatgggtagtatttttatcgttaatatcgttcttgcttttatctctaagagcgctccgcaaatcaatatttttatgaatgcgtttattataaaaattacgtttgggattttcatccttgcgtgcgcagttcctatcttgagtacagtttttaaaaatttgacagatgagatgattcaacaatatgtgtcgttttttgattatttactgaaaaaatagggaggagaaaaaagcttggcgaaggataataagacggaaaaagcaacgccgcgccgcattaagaaagctcgaaacgaaggtaatgtggcgaaaagtaaagaacttaataatgctttttcactgctgattgtagctgggcttctttatttttttggagaaatgtttattaaaaacacgatcaaagcatttgttgctcttttaaaacagccgccgaagcttgctagcatggaaagttatagtttgttttatttaatggaatttggcaaagtgctaatgcctgtcatggtgatggtagttattttcggtttaatgaactacggggtgcaggtcgggatcttgttttccgcaaaggctgtgaaacctcagttcaaacgactgaatccggcgaactattttaagcgtgtgtttagtgtgaaggggattgtcgaggttgttaaagcattacttttaatcacattactttcttatgtggcttacattggctttcgggatcacttagatacactcattagttacactggacaaaattggctctactcactcagtcaaattttcgctttatttaaaaatgaatttctagctttattcctagtaatcgcggtaattgggctgctcgacttcttttaccaacgctacgattataaaaaaggtttgcggatgtcaaagcaagaaattaaagatgaaatgaaggattcggaagggcgcccagaagtgaagcaacgccaacgaagcattgcacggggacttctccaaggttcgattacgaaaaaaatggcggacgcaacttttgtcgttaataatccgacgcatatctcggtcgtgatgcgctatgacaaaacaaaagaccatgcgccaaaattgctcgttaaaggggaagatgagctggcactgtttataagacaggtggcggatacggacggggtaccgatgattacgaatagacaactggcgcgaagtatttactatacgacgaatccagatgaatacatacaagaagatttatataaagatgttattgaagtgatgaaagaattgatggacgcagacaaaatcaagttctaacaacatatgagcgacctttctaaacttagaaaaggcaggtttcaaaatggggaatttaggtgctataaaaaaatattttgctatcttgattgcggtctcgtttgttattgcacttattgtgccattacctccatttgtgttggatttagtgcttgtgacgatcttggcgttctcagtgttagtttacatgcgtgccacatcaattaaagattggaatgaattgaagtcatttccgtctttactacttttgatggggatatttcgtgtttcgattaatatttctacgacgagggcgattttaactacaggagatccgggtcaagtaattaaacagttcgggaactttgttattggcagtaattttgttgttgggattgtaatttttattattctaatcgtctttcagtttattgtggcaaatggttcatcgcggacagctgaggttgctgccagatttacgcttgatgctttacctggtaaacaaatggcgattgatgcggatctgaatcaacgtttgattacagagccggaagcgaaagaaaaacgcgcatacttgaatatggaaaccgaattttacggggcaatggacggagctgggaaatttgtaaaaggggacgttctttttaccgttttgctagctgttgtcaatatcgtttttggtttaattgtcggaatggttcaaggcggactgtcattcggagaggctgcggttaaatatacggagttaactatcggggacggtatcgtgagccaaatcggttcactactaatggcgatgtcagccggggttattgttactcgagtatttgatggctcggatgataacgttgcggtcggaatttttaaagaattaatgcaaaactcggtggttgtatatacgcttgctgcaatgtttatcttaatgggcgtatttagcccactccctgcgattccttttgtcggaattgggattgtgcttggtattatcggttaccgtacgcaatttaatttaaagaaaaaagaacagttggaactggaaaaagaaatggagcttatccagtcggaaacaagctctgctgaagcggaacacaaccaagcatttggggcagcacgcgagaaattcccggtggtagtcgaactcggcttaaatatcgcggcactcgtgaaacaaaaaatgaatggtgaaacggcgaaagataaagtcgtcttgatgcgaaaatcgattttacaagatttaggcattggcgttcctgggattaattttaaagataatacaagttttcaaccgcgcgggaaatacgaaattaaagtaaaaggtgttgcggttgcgagcggggttttaaaagcaggacatttattagcgttaaaaacaccaggcgtgatgatggatcttgacgctgagccgacgaaggatcccattttcggggaagatggttactggattttgccgggagagttggaagatgcgcaaatgaaaaactatcaggtgcttgagccgcttagtattttaattacccatctggatgtcgttttacggaaaaacttacatgaactactgatgcgccaacaaattaaagatttaattgacgggcttgctgatgaaaaccaaattttaattgatgaaattaagaaaaaagaaattgattattcgttgattcaaggggtacttagacaacttttgaaagaaggtatttcagttcgtgatttaccaacgattgtcgaaggaattattgacggacaaacaatttatccgaatgatctagacggaattacagcttttgtcagagagcggatttcaaaagtcatttgtgagcaagcgaaaaaccaagatggcaaaatttacgcgctacttttacaagattcgattgaaatggatacggaaattgttaacacgccgtattatggctacgcgctgaactgggcgctcgataaagaactgccaatcatccaaaaagtaagagataccgtaaataaagcgcaacttactggacgcgaaccagtcattttaacaaggcggaaagattttcgttttggctttgtacgagttctagaaaggtatcaattggatgtaccggtgctctctattagtgaactgtcaccggaaacggaagtggagcaaattgcgttgattgaaccaacttgatgagggaggtaatccgtagaaatgggaaaacatttagtggaaaagatggaaatttttaaggcgaattccaagcgagaaatacataaaaaaattcgcttagtaacgaacgagccatataaaattacggatgaacgtgtcacaaagcttgggatttttaagaaacagtatgaagtgacggcggtcattatgagtgaagtagcgatagcagatggtcgaatggacttccaagaaacctttcaaaaatcagttgtgaaaacgagaccaaaaacggacgatttattaaaaaaggaaaaactactagaaatgcttgccgcgggggcggaacttgcacagtcaacgccactccttgaagaacgtaaaacacaagaagaagagcttacaactatgcgccttgaactggcggcattaaaccgcgagcttgctgtaaaaatgcgtgaggagcgcgagcaaaatagtgatttcgtgaaatttttgaagagccgcggaataagcgatacgtatgtggcagactttatgcaggcgggacggaaacagtttaagcaagtggaaacagctcatttagacgatattaccgattggtttgtcccgtatttatcaggaaaattagcggtggaagattcatttgacttaagtaaccaccgaattatttctttaattgggcaaactggtgttgggaaaacgacgacacttgtaaaactcggctggcaacttttgaagcaaaatcgcacagttggttttattacaacagatactttccgctcgggtgcggtagagcagttccaaggttacgcggataaacttgacgtcgaactcatcgttgcgacaagccctgctgaactggaagaagccgtgcagtacatgacgtatgttagcggtgtggatcatattttgattgatacggttggtaggaactatttggcggaggaatcggtaagtgaaatcgctgcatatacgaatgtcgttcatccggatctaacttgttttacattttcttctggtatgaaaagtgctgatgtgatgacgattttaccaaaactagcagaaattccaatcgatggttttattattacaaaaatggatgaaacgacccgaattggtgatttatacacggtaatgcaagaaacgaatttgccggtgctctatatgactgacgggcaaaatataaccgaaaatattttcagaccaaaaagtcgttggttggcagaacgatttgttgggacggataggaggcaggtactggaatgaaaggattatacattggagcagctgggatgatgaactatatgcaacatattcaggttcattctaataacgtggcaaatgcgcagacgccaggttttaaatttgatcagctcacaagtgaagttatttctaggaataaggtgaactatcagaacagtcctgtcgctaggcaagttggaacgattgattacggcgttcgaccagcggcgacacatattaatttaacggctggatcaagttatattacgaatcgcgaccgagatttctttatgcaagacacaaatccagaacaaggtagtaattttttcattactgccaaaaatggtgagatttctctttcaagaggcggacagttccatactgatcaatttggttttttgcggacggcagatggcgccaatatactcagctcaaccggagaagcgattcaagttggccaaaaaacagctatccgagccgaagcaaacggtgatttatataatgcagaaactaatcaatacttgggacgtcttggaacaaaatttgtttcagcagatcaagtggacagcttagtgaaagacggagaaggaagacttcacgtcaatggaataaacactatgaatctaccagctggacaagggaatattcaaaacggtgtactggaaacatccaatgtcgatttaggcgttgaaatggtacaactgatggataaccagcgtatggtacaagcttcaaaaaatgtcgtgaatatgtttgacaaagtatacgacaaagaagcaaccggattaattcgtcagtaacgacctagctaaggggaggggaaaaagaatgattccagatttggagaaggattatctttactttactcgtgtcgtcaaaagggacttaggtttagatttaacgctttataaagaaacacaaatgaaacggcggattttatcttttatcgtgaagaaaaaatatattacatttggagaatttttcaaacatcttaaaaaagatgcattgcttttagatgagttcattagtttgattacaatcaacgtttctgctttttttcggaaccgcaatcgctgggatgtgctagaaaaacaagtgattccaagactgcttgaagatagtcgcgggaagcttcgtgtgtggagtgctgcttgttcatcaggggaagagccgtactctctagcaattatgatggaacgttcggtgggcactcgacactatgatattttggcaacggatctcgaaccagctattttaaaacgagcagtcatcggagaatatcaaagccgccaaatggaagaattaaacgaacaagaacgacgtagcgcattcattgaaaaaggggatacatatcagattttacctgaatatcgtaaagctattcgttttcgacgtcacgatttgctgacggattactacgaaaaaggctttgacttaattgtctgtcgcaatgtgctgatttatttcacggcagaaggaaaacatcaagcataccagaaatttgcagattcactaagacgtggcggtgttcttttcatcggaggttcagagcagattttgaacccggctgactacggactggccacattaaataattttttctacataaaaacctagcaaaaatgaaatggagttggttagatgggacgaatggaaaacattaaaaatttagcgttttttgaggacaaaccaggactcgcagaacaaattttaatgcttgaaaagaaagagcaactttttttaccaaatgaatttgaaattagacaaacagttggctatgaaatcggggataaagaagtcattcttggtcggctcgagtcgttttattttctcgctttaaaaggtgttaaagaagataattaccgctcgcaagcatttgccagtgaagcggatgccaaagcgtttttcgttcatttaccagaaatggaaaacgagttaattgctttttggttaaatgaagtggaattagttcgctgaaaaaagtaggtgggagatgaagtaacgtggaaataacaacgattataggacttgtgttggcagtgatagtcattgcgggttcgtttatgattcaaaatatatcactggcgatgttatttagcgcagaagcattaattgttatcattcttgggacaattacggctgttatgatggcgcacccatggagtgatgtaaaagtagtaccgaaactgtttaaaattcttttcactaaagaaaagatgccagacaaagtagagatacttgtgcagtacaaagaatatgctgacgaaattaggcgtagcggcgtacttgcgctagaagactcagtagatgaaattgaagatccatttatgaaacgaggcatgcgtctagtagtagatggacaatcttccccagaatttttacgggatgttttggaagaagaagttgcgagcatggaagaacgtcatgctgcttatgccaagatttttgcatcagccggagcatatgcgccgacgcttggtgtacttggagcagcaatgggactcattcatgcgatgggagaaatgtcgaatccagataagcttagcgaagcaatagccgcggcgtttgtttgtacaattttcggtattttcaccggttacgtactttggacaccatttgccaataaattaaaagtaaaatcacaaaaagaagtgcatttgcgatatatgatgatcgagggagtcgtcgcgcttcaagaacgaaatgcaccacgtgttgtggaagagcgtttattatcttttttaagtccaaaagagaaagatgtgctgcgaaatggaaaagggaagaaaacgagagaagtggaggaaattgagcgtggccaagcgtcgcaagaaaccgcaggaggaacacgttgatgaaacgtggttaattccatatagtgatttgctgacacttttacttgcgctattcatcgttctgtttgcctccagttccgttgatgctaagaaattcgaacaaatgggaaatgcatttaagaaaattgttgaggaaggcgcggcaggcaatcaagcatatgtatccaaagaaaaaggaccagatgatccaaatgtgaatgcagtcttgaaggcgatggaagagcaggataaaaagaaagaagcaaacgaacaagagaaagccaaaaaagcagcagctgccttacttaaaaagcaaaacgaagaaaagattgaagcatttaaaaaacaaatcgatagctatatagcagcagagcatttgggagcaaaaatcacgacaaaatactcagacgaagggcttttaatcaccattcgcgatgatattttattccaatctggtagcgcagaattatctgcagacaaacgcgagatagccaaagaaatcggcgaactatttgcgcaaggtaaaggaacgatggaagggattgtttctgggcataccgataatgtgccaataagtacatcgatttattcctccaactgggaactaagcgtcgcgcgtgctgttaatttcatggaagcaattattcaagaaaacagcgaagtcaacccaggtgagtttagtgctcgtggttacggagaattcagacccgtcgccaaaaatgacattgcaacaaatcgcgaaaaaaatcggcgtgtagaaatcatggtgcgcccaattaatcgcgatacacttgatgaagataagtaggtgagttgattgcaactttttttaagcggttcccatacattaacagattatgacaaacaagaaatacaagcatacctagaaaaatttgcaccagtgaaccatattcacttgctttgttataaatcaattgaaaatgaagttttacaatattttctaaaaaaagagcatttggctccgcggttgtcaatttatacatttgcaccaaaagaatgtttaccagagccatttttatccgcgatagactacttggagcgcctaggcagtagctatcaatcatttggttattttgatacggtgataaccaagccgacttatgagaaattcttagcacaaattattaataaaatggatttggtttgttgtttttataacggggataagccgactgatgtgataccagtcgatgtagcaaaatcgttcgatgtgcaaagtatgatttatgatttacctaaagcgaaaaaacatctactacaccgggcgagcagcgataaaataaaattagtgaattaattgatagaaagagggaagattcatgcggccgttaatttcgatttgtatgatagtcaaaaatgaagcacatattttaagacaaagtttagcgtcttttagaaaatttacagaagaaatcattattgtagatacaggttccactgacgacaccaaggaaatcgcaaaagaattcactgattttgtctatgactttgaatggacaggcaacttttctgatgcaagaaactttgcagctaaacatgcaacgggaaaatggattttagccattgatgcagacgaatgtttagaagaagaaagttatcgcaaattagaaaaacaattaaaatcaccaatcgaaccaattcaaatggcacaaattattagttttacaggggaaaaagggcgagtaacaacaacgaaccaaatggcgcgggtttataaaaatgatgggacgatttgtttccgcggcgtcattcacgaacaactagaggcagtcgataaacatgcgattgaagcaggtcttgccgaagtaaaaatttatcattatggttatatgtctgaaattgttgaaaaacaagacaaatcagaccgtaatttgcgcttattagaaaaagaagttaaaaataataaaaacagcggctttgttcactttaatattgggcaggaaatgaatcggcttggaaataaaaaagaagctttgaaagaattttcggaggccttccgtttacgcgataataaccattatatttgggcaaaactaagtgcctatcatatttccgaactacttgaacaagaaaaacgctacgatgaaagtttggcaattattgaagaagcgaaagtcatttggccgaacgtaccagaatttccactgaaaaaagcaaatatcttatacgttaatcaccaactcgaggatgcgaaagaaatttataaaagtttgctagaaaatactgcgatcgactatcaaccaattgttttatacgaagcaacgaactttatgccgcacaaaatgcttggaacgatttacttagaagaaaaagattacacacgagcaatgactcatttttccaaagcatatgcagaaaatagttctgattacggcgtgatgttccaaatgattatgttactgagcaaattccatcaaccaaaagaaattttcgcatttatggaacgtcataactttatttctagtacggaaacaggattgcggttactttcgatgacaacacaacaaggatacgcagagttatctgaactcatcgttcagtcgctaacggatgtttacccgccagtcgcagaagctaccgaagtgaaaatcgcgaccattcgtaacgtcttcccagtaattagcgaatcggccattttattcgggattaaagaagaattaattgacgcggctgacttatgcttgtggcactatgaaaatccgcaattaccaatcgaacgcgtcatgaaaaatagcgatgttggagaaatttatgattttatctttgaaaacggtccgaaaatcagcaaaaaacgttatttatttgtattagaacgagcgattgcgcttggaaaaggcgagtttgccgattacttacttgcgcttcgaaatgtctaccatgatagcattaatagccacattgctgacttgttcttccaatatgattttgccgatattgcgcttgatttttacaatatcgtcgacgcagatgaagtgactaaacaaggctatattaacctcatcaattatttagtagatgccgatgtactggatgaggcgcttgcgattgcagaacgaggtatcgataattttagtaccgatttccgtttctacctttgggcaatcaaaattgataccgaaaaccgcgcgaatcgtattagcgaagcaatggacgaattcccaaataatcgctatttagcaaaattgttagatgaagttacgatgctacaagatacagttacaaacaatcgataggaggccagtaatatgacagaagaaaaaggaattttactacaaagtggaacaaatgaattagaaattgttacttttacagttggcgaaaatttattttgtattaacgttttaaaagtgaaagagattattcatccgctagaagtgacgcccgtaccagattcgaatccggcaattgaaggcgtttcccaagtccgcggcgaaatcatgccagttgtgaaccttgctcgtgtgatgaaattaccagaaatcgaaccagaaaatacgaaattcattatcacagaactaaaccaaatgaaaatcgttttccgtgtcgacgaggtgcaccgtattcagcgcatttcttgggaacaaattgaagaaccagagaaactatcgattggcttagaagaattagctgttggaatcgtgaagctagatggtaatttagtactcttacttgattatgaaaaaatcatttatgaaattagcggaaatgccgattttgccgttactggtgaagatcgtattactcgaaaagtaaaccgcgaagagaagactattttcattgccgaggattcgcaaatgctacgtcaattactggaagatacacttcatgaggctggctatacaaatctgcagttctttgctaatggtcgtgaagcgcaagaacatattttcaaattactcaaagaacaaaaagagcaaacgtttgaaaatgttaacttattaattacagacatcgaaatgccacaaatggacggacaccatttaacaaaagtaattaaagaagatgaaattggtcgtgaattgccagttgttattttctcttccctaattacagaagacctggaacataaaggtgctggggttggtgcggatgcgcaagtaagtaaaccgaatattcatcaactcattaatattttggatgagctcgttttataaaaagaagtgtttggacaatttttctgttcaaacacttctttattttatttaaaaaaataatttataaaaacggaaaaacgttgatattaagccgaatttccatttttatataaataaaaacaacttatttttacatttttaacaaaaaacatttgattttttaaaaaaatgaagatataataaagcatatagagaagagaagtcttttctaaaccgaatgtaggagggaaacacaaatgaaagtaaatactaatatcattagcttgaaaacacaagaatatcttcgtaaaaacaacgaaggcatgactcaagcgcaagaacgtttagcatctggtaaacgtattaacagttctcttgatgacgctgctggtcttgcagttgttactcgtatgaacgttaaatctacaggcttagatgcagcaagcaaaaactcatccatgggtattgacttgttacaaacagcggattcagctcttagctccatgagttcaatcttgcaacgtatgcgtcaattagcagtacaatcttctaacggttcattcagtgacgaagatcgtaaacaatatactgctgaattcggtagcttgatcaaagaacttgatcacgttgctgacactactaactacaacaacatcaaattactagatcaaactgctacaaatgctgctactcaagtaagcatccaagcgtctgataaagctaatgacttaatcaatatcgatcttttcaatgcgaaaggtctttctgctggaacaatcactctaggtagtggttctacagttgctggttatagtgcattatctgttgctgatgctgattcttctcaagaagcaactgaagctattgatgaattaatcaataacatctctaacggtcgtgcgcttctaggtgctggtatgagtcgccttagctacaatgtatctaacgtgaacaaccaatccatcgcaactaaagcatctgcttcctctattgaagatgcagatatggctgctgaaatgtccgaaatgactaaatacaaaattcttacacaaacatctatcagcatgctttctcaagcaaaccaaacaccgcaaatgttaactcaattaattaacagctaataacatatcaaattcatttatcgaacattgtttacccttagcctctcgtcaccccggacgagaggcttttcttttgttttataaaaatattttcggattgaaattatggcccagagccaatgttaagctagttaactattttttgaataattttattataaaaaacggatattttttaagaaaaaggtagaaattgtcttatttttattataaaatgatattatgcgatttttttaaaaaatatttataggtataggaatgggagttgtattttatgttgaagttgttgattgtcgacgatgcaatgttcatgcgtacgatgattaagaatatcgtgaaagatagcgattttgaagtagttgcagaagcggaaaatggactggaagcagtgaaaaagtacgatgaagtaaaaccggatattgtaacacttgatattacaatgccagaaatggacggcttagaagcacttgcacaaattatggcaaaagatccatcagcaaaagttattatgtgctcagcgatgggacaacaaggcatggttgttgatgccattaaaaaaggtgccaaagactttatcgtaaaacctttccaagcggaccgggttttagaggcgttagaaaaagcagctaagtagagaaatggaggtgggtagcatgactacaaatatgttagacctgtttatagaagaagcttcagaacatttacaggcgctaaatgataatctgttacagcttgagaaagacccgacgaacggtcagttagtaagtgaaattttccgttcagcacatacatttaaagggatgtccgcaacgatgggcttccaacaggtggctgatttaacgcatgcaatggaaaatgtactagatgaggtacgcaataatcgattagctgtaacagaacatttggtagacattatttttacatgtacatctcatttggaaacaatggtttcggatatccagcacggcggacaaggcgcggcggatatttcaaaaaccgtagctgacttagaggcgcttttacatcctgaacaagaaacagatacagcagttgagaaaacgtaccgtattgccattcaaattgaagaagcagctattttgaaagcagtgcgggcggtaatgtgtttagagcgacttgcagaaatggggattatttcagaaacaacgccagatagagaagcgattgagctagaagaatttgagcattcgtttgaagtagttttagaaactgcgcaaacaaaagaagaaatcgaagcggttattctagatatttctgaaatcgaaaaagtgacagtaacagaagaagtggaagaagttcagattattgaaccaatcaaaaaagccgcaaaacaaacaaccaaacgattagaaaataaaaccattcgtgtacaacttgaaaaaatcgaaaagctaatgaacgtttttgaagaaagcgtcattgaacgggcgagaattgatgaaatcgcagaaaaaacgaataacaaagaattgatggagcatctagggcgattcagctccatctcaaaagaaatccaaaatggtttactcaacatgcggatggtaccggtagacagtgttttcaaccgctttccaaaaatggtacgtacgcttgccaaagaattaggaaagaaaatcgatttagtcattgaaggcgctgatacggaagtcgacaaaatcgtcattgatgaaattggtgacccacttgtccacttaattcgtaattcagtagaccacggcgcagaaacagtggaagttagacgtaaaaatggaaaaaatgaaaccgccacaattaacctaaaagctttccatagtgggaacaatgttgtgattgagattgtcgatgacggtgcgggaatcaataaacgcaaagtcttggaaaaagcgattgcgaaaaatgtcgttacaagagcagaatcaacgaaaatgacggactcggaaatttttgatttattatttgattccggtttcagtaccgcagaccaagtatccgatttgtctggtcgaggcgtggggctagatgttgtccgtaatacgattcttaaaatcggcggaaaaatcagcgtagaatcaagtgaaaatgctggttcgacattccgaattgagattccgctaacattatcaatcatccagtcgatgctcgttgcaacctctgaacgtcgctatgctgtaccactggcaaatgtggcagaggcaattacgattaatcccgcggacattcaacatgttcacggcaaagacttaatcaactaccgcgaaaccattattgaagtactcgatttaggcgaatgcttccatgaaacacctttaacagatacggatgaattactattactcgtcgtgaaaaatgccaagcgaacttttggacttattattaaagatattatcggtcaacgggaaatcgttttaaaaacacttggcggctttttcagcgaaagtcaaattgccttttctggggcaacgattttaggcgatggccgtgtcgtattaattttaaatttagaaacattttaaggagggaccatgatggaacaagtatttcaagtagaacttcctgaatgggaaccgaaagaaccgagccaagaaggacgcgaaaaaggctcaatccgccaagtagacaatattggcgttaacttaatcgtccgccttggaaaaaaagaaatgccagtaggggacattgccgagttaagtattggcgatgtcctcgaagtggaaaagaaacctggccacaaagtcgaaattttcctcgatgaaaagaaagtcggcatcggtgaagctattttgatggacgaaaacttcggaatcgttatttcagaaatcgactaaagaaagagggcaagtgatttgaagcaagaggcttacaacgcagtgaagatgaaagtggaccaagagaaaacggccattttaaaagaattgcaattattactatccaaacgggaaaaagttacagaaaaattagcacacgaaaaagaagtctattactcgagaacgaaaaaagaaagactccaagtggcggtattagccggaagcatgcaacttgatgccttttccccgagccgcattcaacaaatggagcgagaaattcaccaaattagccagtacattaaaagcaatgaacaaatcttagaaaaactcgaggaaaaagggaaacaggcgaaaaaaatgtacgatgacacaagaaaaaaatggcaacagcttgaaaataaaaaagaagaacaactattacgcgatttgaaaatggtgctattaaagtaaaagggaggaaaactcatgctaatcccagataatttgctacaaccacttgtcggaaaaaaagaaatcgaaccaaaagaaatgttagcagaagaattagtagaattaccttttatttcacttttaatggaaaatagccctgcgccgctcttaaagggagaagcgggaaatgaagagctagccaccattccattaaaggaaatcgcaccaccactcgtttcagcaaaattacttgaaggtgagccggagaccaaactaccggatgcgccacttgagctgaaagaagttaaagacacacttgcggcaatcgccaaacaagcaattgaacaaccaaaaatagaaaacgccccgcaagccgtgcaaactccagtaacaaatacaccgaatgaacccacaaaaaatgctaccagagaacaacaaccgccaccagaacttatcatgcccacaaaagaatcacctaaactagcagaaaacgtggccaaaaaccaaccagtcctagccaaattacctcaagaaaaagaagtcgtgcaactttttaaagcgagcattaaagaaccggtaacagcaaaagaagaagtcgctgtcaaaaagccagctgaatcaagtaatatttggcacgatacggcaaaacaactcacaccagctgcaaaagtcgaagtaccagtaacgctgaaacaactcgataaaaccatcaccgaccaaatcgaacagttgcaaaaatttcaagtaaagcaaaataaagcctttttcgcgattcaaccagagtcactcggaaaagtcgaagttttacttaaaaaaatgcccgataaaatatttgtacatatcgaatatcaggagcaaacagcgaaacaaaaactcgaacagatggcgcaagatttgcataatcgcttccgagatcgcggtgtagaagttgccgtaacaatgaccgaaaaacaagcgccaaaagaaaatggtcaagggtcagatggacgacaccaaggcgaatctaaaaaagagaaagaacgcgaaaatccacatcaggaaagagctaaacaagaagcatttgatttagaggaggagacgtaatttggacggaattagtagtttatcaggggcgagtcaggatacaaacaatgcagtaacatctagcgtatcaaaaacccttggcaaagatgacttcatgaaactatttttaacaagtttacaataccaagacccatcgagcccgcttgatacgaatgaaatgatgtcacaaatggcgcaactttccttaatggaacaagttgccaatatgaccactgccgtagataagctatctgaacaagcacaaaactccgccttacaatccgcggttaatttcatcggtaaagatataaaaggagtttcactaaacggcgaagtaattagcggccaagtcgaaagcgttcaacaaacgacaaacggcgtcatgctgaaaataaaagaccaagatagcctcgtgccaatgacttatgtaacagaaattaattaaaaatttgggagtgtgaattatgaatcaaactatgtatacagctatttctgggatgaatgcgttccaacaagcattatcagtgacatcaaataatattgccaatgcgaacacgacagggtataaaaaacaaagcgtcgttttcaatgatttactttaccaaaacacaatgggatctgttgcaggcggactttatgctggaacaaacccaatgagcttcggttccggttcgaaaattggggcaattttaaccgattatacagcaggttctccgacatcaactggcagaaacaaagatgcagcactgcaaggccgcggctttttcattgctggcgataacgctggtgggaatatcgtttacacacgagacggtagctttgcagtatctgacaataactatttaacaacgcaacaaggaaaatacgttatgggatatgcaacagataaaaatggcaacgttttaaacggaaacttgcaaccaattcaaatcccattaaatagcgcaattccaggcgaagcaacaaaaaatggtagcttaagcggtaacattccacttgattggggcgaaaaagatacgatttcttccgagctttctgtatacgataatgctggtggaaaacataaacttcaagtcaatatgaaagctgcgacaccagatgcgagtggcaatgtttcctatgaatatgaaattcaaatggacggaaaagcgttaactcctccagtaacaggaacacttaattacaacgcgcaaggcgaacttacaaaccctgatgcacttaaaaacattcaaatcaattccactgttaacggcaaacaagtcaatatgggcttaaacctaagtggcttaacaaactacggtaccaaccaagtattctcaccaacttctgacggaaaaggcgctgcaactgtaaaagactacgcagttaccgattctggttatattgcagtgagttactcagacggtacagttatcccagttgcccaacttgcggttgctactttctccaatgaagacggcttagtcaaaatggggaatggcgaatatgttccaggattatcttctggagatgcagtttacggcgttgctggccaaaacggagctggcggaattagcggctcttcattagaaggctcaaacgtagatttatcccgcgaattcgttaacttaatgacataccaaagtggtttccaaggcaatacaaaagttatccgtgttgcagatgacgtgatgaaacaaattgtgaacttgattcagtagggagtttagctaaatgaaaattaatcatactattccactcagaatcgacttcgagttaggacgcacgaaacagccagtcggtagtttgttagatgtaaaaaaagggaccgtttttcggttagaagattcaacaggcaatgtggttaaaattacaatttcaggcaaatgtatcggttacggcgagattttgacaaaagacggcaagatgtttgtcaaaataacgaaattaggagagggaagttcttcatgagagctagggagtgacaaaaaatgagcgataaattaagtcaagaacaaattgacgccctgctttcccaaatgagtgaaggtaaggtagttgatgaaagtacggaaattggcgactttgggcgctttcatccctatgactttcataaaccagagaaatttggtgctgaacacctcgaaagcttaaagacgattgcatcagcatttacgaaaaaaagtatggagtttgtttcccagcgtatccggattccaattcataccgaagcaacccttgcagatcaagtttcctttgcgagcggttatatcgaaacaatgccgaacgatagttacattttctgcattattgaccttgggaatccggagctcggccaaattattatcgaactcgatttagcctatatcatttatatccatgaatgcttatctggcggaaatccaaaacgaaaattaagcgagcgcagactattatctgtttttgaagagctgacgttgaaatctattttagaaaaattctgcgaagcactcaaagacagttttaaatcagtgcatccaatctcaccagaaatcgttaatatcgaaaccaatccagcgcttctacgtgtcacatcaccaaacgatatgatggcgcttgtgagtgtcgatattaaatcagaattctggattagtacaatgcggattggcgtgccatttttctcggtggaagagattatgaataagctggaaaatgtcgttgagtatacgtttgataaaagacggaactttgatgcggaagtggagcaagaattgcatcaagttgagaaagaagcgcgtattcgggtgggggaaattaaaacaacatggaaagagcttaatatgctagaagttggcgacgtgcttctgacagaaactcatatacgtgacacacttaaaggttacgtcaccgaaaaatggaaatttgaatgctatatgggaaaaagtggtaaccaaaaagccgttaaatttatgcgtcatacagggcgaacagagcaggagaggtagaagtggagcaattactagagaaaaatatcacgcaaatggaactagatgtgataggagaaatcgccaatatttcgtttggctcagcttctacggtcttatctgatttactacaccaacaagtcactatttctacaccaaaagtagagattgttgatttatataatacgaaagacattgatattccacatgtcgtgttagaagtgaattttcacaaaggaatcgaaatgcggaatttatttgttctgcaatcagaagtggctgcggctatcgcggacttaatgatgatgggcgacgggaatatcgatccaaacgaagagctttcagaacttcatctcagcgccgtacaagaagcgatgaaccaaatgatgggacattccgcaacagcaatgagcaatatgtttggcgaaatgattgatattacgacaccagacattaaagtaatcgcgttaaaagaacaattagaagacacaaacgaccaaacaatgataaaagtcggctttgacttaattatcggcgacttaatcacatcgaatttaatgcaacttattcccgttgataaaggtcgtgaacttgcgaaaagattgcttggcgacgcaatccctgagccagagcctgtaaaagaagaaattagcttaactgccgaagaattagatgtctttttagaagtttgtaatatcggcattggctctgcttcaactgttctatcgaaattacttaatcgcaaagtttcgctacaaatcccaacagctcgcgtgattgatagtaaagaattcgagtttaatgaacgaccttgcttagtaaccagtgtggaatttgtcgaaggactgcgttcaagtaacacctttatcattagcaaaaatgccgcgttaatcatggcagacttgatgatgatgggggacggaatcgttcaagaagatgcggaattaacagaacttgaagtcagtgcagtgcaagaattaatgaaccaaatgatgggcttctcagcgacagcgatgtcagaaatgctcggaacaaagattgatattagcccgccaacgatggaattctgcaattttggtgatacgatgattcaaaaaaatattgcagaaggaaaaaccgttgaagttatcttcccacttgaagtagaaggcttattaaaaacgccaatgtatcaaatttttaatccggcagcagcaaaagaaatggcacaattaatgctcgggattcaagcaaaagaagtcgcggaaaaagaagcaacaccagtagaaataaaggagcatgaaacgaaagagccagcgcaaccagtagttatggaagaaaaagaaacactatccgaaatggaacaaattttggaagatattcctgtaacgcttgaagtggtgttcggtacagctaaagtaaaactagaaaaatttatctcatggtgtgaaaaagatgtgattatcctgaaagaaagcatgaatgaaccacttgtcttagcgctaaatggcgtaacgattggcaaaggaattttagttcgcgtggatgatcattttggtatacaaatgactgagttagtaaggtgaaaaatgtgcgaaaacttggactgatgacaattttattttggatgtttatttctgttcaagtattcgcggcagaaccggaacttccgatgatttcacttgaaaaggaacagcagatttttacgtcaggtgaagtgatttcatttcatatcgaaaatgcggaaaagatgaaaatcgttttagtgaatgaacaaggtcaaaaaagactcctagatggcgaaacatatacggtgacggactttgatttagagggaagctaccgcgcagaattttacgcaaacgacaaccctgaagcgattgttactatagatgatttattccaagtgcaacagctgaaggaagttgaaaaagatgaaacggcacctagtttaacagatattaccttcgcgcatgacgaagatgttttacatacaagcgcccttcatgtggcagcagatttagccgatgcagaaacaggtgtaaaacaagcgatattgataattcatagtgattcgaacgacgcagaagctgaattaatacaaaataactggactgggaaatttgaaggcgaagtaccgttagaaaaatttcaaccaggagaaaaactcacttttcagttgaaattagttgattttgcggagaatgaaatcacgattgacttagaaaaaacgattcagatgtatcagccgaatgagccacatctaagttataacgctgttgacatcaccaacgacgagaaaaaaatcgtccaagttggcaatcaaatcaaattaacgctcgataaatatacaactgaatttccagaagctgaaacggaaagtggtattaacattccgctaaaatggcaaaaaaacgccaacgaatggattggaattctcactttaacaaaagaattatccggcgaaattatccattttcaaggaatgaacatagcaatgctcgttcgctccacaagtgagccatttgcggagattaacttaatcaataatacggttttaactgggctaattaatccggattttgctttaatcacagcattatccgtcgaagtaaatgggcaaacattccgcaccgttagaacggataatagcttcaaaagtgcggaaatctcaacaaccggaaaaatcatattacactggatcgactgggacggccgggcttattctaaacaattgagtcaagaaatcaagccagtgattcctgtaccagataaagaaataattgcaccaccaccagttataccaaatgaaaaagagccaatacttgcaaaacctgcccctaaaccatctactgaatccagcgaaaaacctccaaagaagcaggctaagaaggaaacctcaactaaaaacaagtcaagcagtatcccgttttggattccggcactcatgattataggcgttattattttttcaggtaatagagcaatgaaataaaagcagaagtgaggtggacggaatgaaaatagatggcattcaagaatccgcagaaaatcgtaatcagctagaacgggaattaattaaacaaaatccattattaaaagaaggcagtgcaaaggcacaaatgaatacagaagtcgcggtaccaaaaacgccaccagtatcattttcctttaaagaactaagcagtttgcaattaaacggcaccacaaccgcaaatctagaattatatatgaaattaatgatgaataacgccaaaaaagcgaatgacttaattttttacgtcatgcgcgcaggtataaaaaatccaactgactcggcaaaatggcaaacggtcagaagcgaaatcagcagccaattaagcaccatcttaatgaaacaacataattttgaagcatatttttctgaaaatccagccaaccaaaagttgtttttagccaatcaaaaaattatgaacgaaatttcctttttgctaaaaatgttaccaactttaacatttgaaacaactggaaaatatgattttctccgtatgatgcaaatcgcctctggaaatatggaaactggtatccaaatgatgcgagagtttcaaggtcatctggaacatgcgacaagacttgaaccagtagttgacgctaagcaagaaacaaactggatgattaaagtattacgtgagtttggcaatatgttccattcccgccacttactaccatatgaattacaagctgaaaacatcaacatctggaaactaggtagcgaatacttaaaactaatgaaccaacttttaccacaaattggcgcatttccaaatggcaatattaaaatttttcaccaacaagcgacaaaaccattaacggagcttttccaagaactacaaagattagctgatggacaaatgactcaaggcgggattgctgttattctcgaccgaatgcaaggtcagctttcaagactcgcgcagctttttcaaaaaatggaaatcgaagcgggctttacagattctgagcgaattttaggaagtgtagacgcagaattcgctagtgatatgacaaagatgatgctactcgcacaacaagaaatgtcgtttttagatttattagtaaaagattttcgaagcgtctccaaacaaccaatatttttcatgatagttgctatatttattattttattattaattattttattttaaaaaagatattttttcaaaaaatatatactttttcaggttgtttcagtataattaaatagaaaaataaggtttagaaagcgaaaatgagtttttcgggggaaaaaggatgaataatgtttcaattagccagatttcgcagtccaaacagacgaacttagttaggggaatgcaagaattaaatcaaacacaacagctctattttgagcaaatgaaggcaaatggcaaaaaacaaactccttccctgactgaaatcaatgaactaattaccgaagtgacagataaaaaatcacttgttgaaatggatatgactgtagataacgttttgagctacaaaaaagcagtccaaagctttttgaatttttatgttaataatgtgatggattatgacaatatcgaaagccgacatccaaaatacgggttttcgcaaaaaatgacgattttaaaacaagtagaaaaacaaaccaatgaactagatgatgtaatgaatttaattgatacaaaaactggacatttagatatgctaaatcgaattggtgagattactggcatgattctcgatgtcgtattgtaggtgatgggaatgcaaaacgaattaattaatcaattagaaatcttaatcgaaaaaaatgtaaaagcggccgatgaagcgaatgtattaggtaaattactacaagaagaaaattggattgaagcagaagagcgccaactagggcttcagcgcgaacttgccggtttacaaaacgaatatcacgttttaaaaacaattattggcgaagataatacacttagaagcttgcaaaaaacatggacacctgctgaaaatgcatttattgatgaacgtaaaaaaatgctgcttgaaaaagaaagccttttacgagtaactgtttctgaaaatcaaattagaacagaaatgcaattagctttttcggaacatatggtagatgttattacggggcatcacgcggaaactcaagcagaaaataatatgatgattaacgaaactttttaagtaaacggagggattttttgtgcgtttaagtgattttaatacgtcattatcgggcatgtcagcggcgcaaatcgctaatatggtcgctcagcaaaatattagtaatatgaatacgccgggttatattagacaagctgtggatcagacggcagtttacggtgacggaggtcttctcggcgggaaacaaacaggctacggggtcaaagtaacagatattaaacgactgacaaacgcagctcttacgacacaatataataatcaaatcgccaaacaatccgcttcgttatatcaaagtggggcgctcggtcaagcgcttaatttatttggtactcccgggaaaaatacgccaagtgataatttagataactttttcaccgcttgggctgcgttagcaaaaaatcccgatcaagcaacgaatacaacggcacttttatccagtatgtcgatttttacggaccagttaaatcaacttcattctggcttaaaagaattagaaacaaccattgcagcagatacagatgccgcgattcaagacttaaattcattaattaaaaaactaggcagtatcaataaagcaatcggaaatgcaggctccaatccaccgaacgatttactgaatcagcgcgatcaactacttagtacgatgtcgggctatgctggtatttctgttagcgcccacccaaataacccagatgtatacgatgtgacaattggcggacgtcttgtcgtacaaggtgatgaaacaactgaaattacctcgacacggacagcgacaggcttcgaattctccgtggacggtcaaaaactcaatatgccagaaggttccatcatcgcttctgtacgcgttaaccaaaatgaaattaaatcctaccaagaaaaaatcgaaactttttcaaatggcctagcaaaagcattagatgatattcaagtcaaaaacgtcaacaaaacaatggacgacttgcaaaaaatcaatgatgcccttcaagctaatccgaatgacgaaaaattactcagcaaccgcgaagaacttttacgtcaattagaaaaattccctggtgtgacgcgttctggtgatacgctaaccattggcggagttgaccacgcgattgacacacttggtacaagtacatatgtaactgatgtgaacgatttttcgattccaattttcacccaaagctctggtaaatggatcctgaatcccgcaatcactagcaatgctgaaaacaagccattcttaggtgttatcgcggcagatattgcatctttaaaaacggataaaaatattcaaggaacaacttttccaagcttcatggatggaatcattacagaagttgcaacagatgcgagtaaaagtagtgcaacttccacggcagacacgcaagctttaaattccctttctgaatcaaaatcatctcttgaaggagttaatattgacgaggaaatgacaaatatcatgcaataccaaagttattatgtggccaatacgaaagccatgaacacagtgaacgatatgatgaaagctctcttagccatgttataaggaggaaaataatgcgaatttcaacgaatcaacaagcaaattcaataattaaccagctgaataatgtctcaggaaaccttgcaaaataccaattacaagtatcttccgggaaaaagtatgaatcgatgagcgaaaatcctggtgctacagcacaaattttatcctataatcacgtgcttagtcagcttaatcgtgaaaaaacggacgtaactgaagcgaaatcattattaaataccgcagaaacctctctttcatccatgtccacatcgatgaaccgggtaaatgctctagtcttacaagcaattaacggtacgagcgataaagacaatatgtcgcaatcagccgaagaaatcaaaggtttacttgatgttcttatttctgttgctaactcagaagacgatggcagatatgttttcagtggttctagtacaagcgttaagccatttacaacggataaaacaaccggagaaatcatctataacggaacgacagaaaataaaaaattccgcgtaacggacacattagaagtagaagttttccatgatggcagcgcgatgacggatgtttttaacaacattcaaaaaatcgttgacgcaatgaaaagtggcgataaagatgctttgtctgccttgcaagaaacaaatagcaaaaatatcgaaattattaccaattcgatgacaaatatcggcggacaaaaaaacggcgtgacagcctatgacaatgtactttctagcaaaattgttgatttctccgaacgaaaatccaatgtcgaagaagtcaatatgccagaagctgtaagtaatttaaacaaaacgtctatcgcttaccaagccgcactgcaatccagtgtgatggtacaaaaattaagcattctaaattatatgtgaggtgaaaccaagtgggaagttcgattgcaagtagtttaatggatccgacgcaatattattcgcaatttattagtctccaaaaagccagtttagaaaaagcaaaaacaccatatcaaaaccaaatttctagctaccaatcacggattgatctttatgctagtttaaaaaatgctttgtctgactcgctgaaaacgatgagttctttcacgacttatgaaagtaaaaccaaactagcgacttcatccaacgaaacaagttttaccgtttcatcaacgagcagctccgtcaacggcagctattccatcgaagtacaaaacttggcgaccgcagacacttacaacaaagcagtacctgatattgaagcaaaaattggtgtaagtgggacaattaaaatcaacggtaaagaaattaaagtcgatgcagatagctcgatgaaaaatgtgatgaactcgattaatagcgctggtgcgaaagtaaacatctacacattaggcgaaaatatggtcgttacagcttcaactactggtgtcgaaaacagcattaaatttgaaggcgattccgcagttttagaagcacttggtttagtacaaaattcaccagaccatttagcggcagaagatgccaaactgagaatcaatggagcaactgtcacaagtgcaacaaacaaagtaaccaactacattccaggcgtgacaatcaacctcaaaaaagaaacaactggcgctgaaaaattaacgattcaagatcaaagcgatgaaaaagcagccagcatgattacaagttttgtaaatacatacaatgcgctaacaagcacaatgaaaacatacacgggaaaaggaaccattttacaagcatctgctgctgacctcgaagcaaatcgtgcgctaaacaatgtatttcaacataaaaaagacggaaatacattatttgactttggcataagcgtcgataaagaaggcgttttaaaagtagatgaaacagcgatgaaaaaaatggtagctgaagatccaaccgccgtcgaaagatttttctttggtattggtggaattggcgatgaactttatcaatctttgaataaaacatttggctcgacaggctttatcagtgatgaaacgacctcgatgacgaatgaaatcaataaattaaatctcaagctaaccgacattactagccgaaatgacaccttactaacgaatattaccgaccagtacaacaaatggctcgaaatgatgcaagccatgcaaagtgacgcaatgactctcgacgctctaatcgatggcatgaacagttctaataaataaaaatggtaggtgaaaaaaatgcaagcttggaaacgatatacccaaaatgaactaaatacgagcaaccctattaaaaacaccatttatatatacgaacgttgtattattgaatttaaaaagttggacaaagcactcgaacaactgcatttctcagaagcagaccttattctcgataaaatggaaaagatctttgaagaactaaaattacaattaaatcccgaagccggacaagaactttacgataatattttcggcttatatgaatggatttctgaacaaattcgtcaaatgcaactactaaaacaacccgttaatatcgatacaattattcacgtcatcacgcagcttaaagaaggctacgagggagtgatgaaacatgaatcaagcaaagacacatttggctgagttaaaagcactgtttcactcgacgggacaattaaacgttaacctcgaagaatatcaagcgaaactaaatgaactactaaaaagcaccgaacatctaccaaaagacacaaaagaagccattttaaaagaaacaagagaagttataaataaaggtattcttttcacccaaaaacaattagaatccactgaaaatgccttttctgaaaataaaagtcgcaatgccgccaacttgaactatgcgaaatttttctaaaagaaagaaggaaatcacaagtggaaaattataccacgcatattggcaactacttgaactatcttcaaacagcgaaccaagtagtttcaaataatatcgcgaatgccaatacgccaaattttaaagcaagtgaagcgagttttgaagaatcattcggcgcgagcttgcgagcatccggttcgaacaatatcgaatcaacgggaaatttaacgaaaacgaacacgaagcatttagccggaaccgatatagacgaaacaaatgcgaaactcacgactaaaagcggctccatcaacgaagacggcaacaatgtcaacgtcacttctgaaatgattagcttaactaaaaataaccaaatgtacgcgctcgctatcagtgcactcaactataattcatctatcaacacagcagcccgtggaaagtaaggtgaagacctatgtttgaaggaataaacacaagtggttccgcgttaaatgctgcgaaacaatggatggaagttagctctaacaatattgcaaatgctgattcaagcgccgcaccaggtgagacaccttttcttagaaagcgcgtcgtactatccgaaattacgccatttgaaacagctttaacaggtacaaaaggtgtgaaagtaagcgaaatatcaagcgatacaggaagcgttaagcgcgtctatgatccaactcatcctaacgcaaatgaagcaggttacgtcaactacgcaaatgtggatatgacagccgaaatgaccaatttaatggtcggacaaaaaatgtatgctgcaaatacttccgccttacaagcaaatgaaaaaatgatggaaaaagatttagaaataggcaaagtataaaggagtgttttaaggaatggcaattgaaagtattaatgcagcaagcgtcttacctaaagttacgcttggtgaaaccgcaaaaacagacaatgcgacaggtgccggaaatacctttacgcaaatgctggatagtatgagtgatacacaatcaaacgcacaaacttccgtatcaaaccttttaacaactggcgaaggtaatgcgagcgatgtactcattcaaatgaaaaaagcagaatcagaaatgaaaactgctgcggtcattcgtgataatgtaatcgaaagctacaaacagcttttaaatatgcaagtgtagcggttagactagtcgggggagttttagtcaatcgtccacacgagaaaaatggagcgaagtttttaagatggcaaaaataaaaacaatgtattcgaaattgaagaattggcataaaggcgcgatttttgtcggcctttttgtcgtagtcacggtgttattactctacatgaacacgcccaaaacagaagttaccctttataaaaatttatcagaaactagccaacaacaagttacagaccaattagccaaaatgggcgttgattataccgttgataaaagcggcaatattttagtcgatgaaaaagtggagacgcttgttcgtgacaaatttgctgacttaggaatcccgtatacaggccaagatggcaatgatattcttttaaatagttcgcttggagctagtgaagaagataaaaaaatgcaagaaaaagtcggcacaaaagttaacttagaaaaagaaatcgttcaaagttacggcacgaccgtggacagcgcatcagtccaactaactttgccagaatcaagttcgatttttgaagaagcgagccaaaaaggaacggcagcagtcacgctaaaaaccaaaaataaccaaacgctaacaaaagaacaagttctcggtatccaacgaaccgtaagtgcggctgtgccaaacgttgcaagcgatgacgttgcaataatcgatacaaaaaatggtgtgatttcagaagcagatacctctaaagaagaaggtagctcagcttataaaaatgaagtcgacattcaaaacgcaatcggaaaaaatgtgaaaacagacattgaaggcactctttcaagcatttttgctctagataatttccgagtaaatacaaatgtcacagttaattttgatgaaataaaacaaaataccgagcattatccaaatgacggtaaagtccgaagcaaccaaaaagaaacgtccaccgatacatcaaaaggctccaccaaccaaacagagtcaggaactgcttcgaacgctgacgtaccaaattacaccgaacaaaatggcgatgatactaacacctatacgagtgaaaaatctagcgaaactacgaactatgagcttgattctaccattcaagaaattaaaaaacatccagccttggcaaaaacaaatgtcgttgtttgggtggaccaacaatcgctcaataaaaatggcgttgatatggctgaatttacgaaagctattggcgtttcggcaggactaactcctaacatgacgaccgaagaagctggtgaaggcggagaagcagcagccacaccaacattcgaaggaacattccaaaacggcgacgtgaccattatgccaatccaatttttagacaatcaaacaccagtagaaaaagatactactgaaaaagcagaaccagcaagtaaagcttgggtttggtggcttgtaggaagtttactatttgccctaattgcagctggaataattgcctatatcatcttcttgaaacgtaaagaacaaatagaagaagccctagaagcagaagagaaagacttcatcccagccgaagaggcgatagttaatccagaagaacatccagatttcaacttccaaacagacgcattcgatttatcagaaccagaacttaaagctcgtaaagaaagcttgaaaaataaactcggcgaaatggccaaagaagatccaggtcgcgccgcagcagtcatccaaaaatggctcaatgaaaggcaggaataaaaaatggcagaaacactcaaagaaaccttagaagaaactagcgctgaactggaaactgtcgaagtagcagaaccagaagaaaaagccgctactcaactagattcaggtatttcaagacgtgaaaaagccgcccttattatttggagtctagatgaacaaatcgcgactgaagtagttgatttacttccagatgcctccaaacaacgccttgcacgtgaaatggccaaaatgaaagaaatggatggcggcgcagtggaagaagcaacaagagaatttcttgatgaactagagcttctttctggcgggattgctaaacttgaccgagaacacttgcaacgcctattccctgacatgacaacagaagaattgaaccaattaatttacggggtagaagcagaatcgcgtatcggcgaaacagcattagatattttacgagaaattgatgatgtcgattccttgtttacgattattagtgacgaatcaccgcaaacgattgcgatgattgcttcatacatgaaaccggaagaagcatctaaactcctagcccttttaccagaagaaaaaatgattagtacggtaatcggcatcgcgagcttagagcaatttgatagtgaagttatgcaaaatgtatctaatttactaagaattaaactggatacaatgtcgaatagttcgcttaataaaacggacggaattaaaaatgttgcgaatatcttaaataacgttactcgtggtttggaacgtactattttcgagcatttagacgcagaacaagccgaactttctgaacgaattaaagagaaaatgtttatgtttgaagatattattctgcttgacaatatgaccttacaacaagtgcttgccgagattcaagacaacaacaaaatcgcccgtgcactcaaaaatgaaaaagaagaactcaaagaaaaaattctttcttgcgtatcgaaaaaccgtcgcgatatgattaccgaagaactagaagtccttggcccaatcagactttctgatgtcgaacaagcacaacaagacatcgctaatgtcgttaaaaacttggaaaaagatggcaaaatagttatccaacggggggaacaggatgtccttatctaatccaagaatcccaaaaggcaaagtaactttatccgacgtgaaaatggaactattctatttagaagatatggaagaaacagaggaagtcgaatcaccatattccaaagaacttgaacaactagaaaaccaccaaaaagaactcgaaaagcatatgtcagctatcgaaatcgaacaacaaaagctagcaaatgaaaaagcagcactaaaagctgagcgccaagccattgaagaattaaaacaaagcgcagaagcagaaattaaagcacaaaaactagcttttgaacaagaaaaaacacagctttacctaacaattaccgattttctttgggatgaaagcatcgatctcgcggaaagaattgtccaccaagcaatcgacacccgccaaattgaagtcttaccaatgctaaccgaagtcattcaaaaactcccagttgctttcgacaaactaaacgtcaccacccatccagaaacattaaaagcacttaaagaagaaaacaccggaacaaagtacgactggcttttagaaaatattcattggaacttcgatatgcggcttgattacggcgaattcactgtagaagaagaaaaagaatacttcgactaccgaatcacagaaattttccaaaccttacacaagcaaaatgcagaacggaaaattctaggaggagataaatcgtgaattggtcgccagaaaccgaagcttggcaagaactaaaaaacaccgtcccatacatccaaaaaggaaaaatccacaccgtccaagaacaagtctatatttccaaaggcccacaagtgaaaattggcgacaccgtcatggtcggcgaaaacaaagtgctttgtgaagtgatttctatcgaaaaagaaaacaacatgctactcccatttaaccaaagcgataaagtagcgtatggtgactgggtgtacgtgactgacacaaaaatcactattccagccgatgaatttttactcggaaaagtgttaaatgcatccggtgatattttaaatgaagaagctggtactgctaaatttaaacaaaaaatgccactggaagcaccgccaatccatgcttttaaccgagcggaaattacggaaacacttgaaactggaatcaaagcgattgatggaatgctaaccattggtataggtcaaaaaatcggtatttttgcagggtcaggtgttggtaaatcaactttgcttggaatgatagcacgtaacgccaaggcagacattaatattatcggtcttgttggcgaacgtggtcgggaagtaaaagatttcttgcgtaaagatcttggtgaagaagggttgcgtaaaagcgttattgtcgcagccacttcagatgaaagccatctcatgcaactgcgtgctgccaaacttgcgacttcgattgcagaacatttccgcgatcaagggaaaaccgtcctattaatgatggattctgtcactcgtttcgctgatgcaagaagaagcgttgatattgccgtcaaagacctaccaattggcgggaaaaccttgctaatggaatcctatatgaaaaaattgctagaacgttccggtaaaactaaaaatggatcgatcacaggtatatatacagtactcgttgatggagatgatatgaacggaccagtacccgatttagcgcgggggattttagatggtcatatcgttctaacccgagaactggcaacaaaaaaccactatccagccattgatgtccttggctccgttagccgggtaatggaagaaatcgtgccagaaagtcagtggaaatctgcttcgaaaatccgcgaatggatgagcatttaccaagaaaatgaactgtacttcaaattaggaacaattgaacaaacaagcgacaacgcagccatttttacaagtaaggaaaaatcatattttattcatcaatttttaaaacagctgcgggatgagagtgtcacgctagaagaaacgagtaaaatgatggaaacgttagtataacaaaggagtgccgtggatgaatccagtagaacaagttattagtgctagacaagccgagtttcaaagcgcatttgaagcagcgaaacaatcggccaccacttttgaaacgaaattaaatgaacgtttaaatgcgacaaagcaaaccaccacaactaatgtgcaaacagtcaccgatgccgaactagctcgcgcccgtgaagcatacgaagctttaataaataaatccgaaactaaacaaactcctagtgcaaggtcaagtgtaacaaccgaaactccagcagcaacaaccggagagctaactaattggaacaactaccaaattaaacctattagcgctgaaaatgaaggcaaatatagcgatttaattaaaacagcagcaaccaaatacggtgtaccagaagcgcttatcaaacgagttatccaagtagaatctaattttaatccgaatgtggtttcaagtgctggtgccactggtctaatgcaactaatgtacggctctaatcgaaccgacccagcgactaatatcgacgcagggacaaaacagcttgccggttacatcaaaaaatacgatggtgacctaaaattagcattagcagcctataacgctggaccaggtaacgtacataaatacggcggggtcccaccattcaaagaaacgcaaaactatttaacgaaaattatcgggtaggggagaataaatcatgggaaactggcaacaaaagtgggaatcatggcgcgatatgacagcagcaatgcaacaagaaattaaaatcgaagcagctgacaaagtaacttcctacataaaaaatgaccaatttgaagaagcaattaatgtcatcagacaaaccgaaaatctcctaaatgaacttgattttgaagcaaaaatgaaccgcgtcgaagaacaactccaagccttcacatccgaccaagaagcatctaaatcattcgaagcgagccaacttcaaaacctagaaaaaccaagtacaaccgtaagtttcgacctcgctagcgtaaaatcagaagccatcaatcagttcaccaaacgcgatttcaatctagtagactcacatgatacccacatgcaatttctaaaaggcaaccgcaatttttacatggacattttcaaccccgaagaaagcgaagaacatcactacgctaaccttcatgaaaaatgccaatacaaaaatatcggattcatctgccaaaatgaagcagcagccgaaatggccgcaaacttaacgagcgaatggcttgaaacattagaagcacccaaaaagaaatttttaacagttaacatcgctaacttaagcgcaatgaaacaaaaccctgaagtactatttaaataaaaaatgtgaactgttttctgtaaaaagaaagcagtttttttgcagaagggttgacaatcaacctactttgtattactatatacttgtacctagtaacaactagtagaggagtgaattcaaatgaaaggacttaccgagttactcaaaggtagtttagaaggaatgatattagagcgaatttctaaaggtgaaacatacggttatgaaatcaccaagtatctcaatgacctaggttttgatgaaatcgttgaaggaaccgtctacaccattctcgttcgtctcgagaaaaaagaactagtcaatatcgagaagaaaaaatcagaattaggcccacctagaaaattttacacattaagcccagccggcgaagaagaactagcaactttttggaaacgatgggactttatccaatcgaaaatcgtccaaattaaaggaggaccagcatatgtttaaatggtacacaaaataccgcgaagaaaaacgagactataaacaatacaaaaaaagaatagacgcgctcccagaagactataaaacagcaatgaaagccattgaaacctatttatggaactttgcaaaaggcgcagggatgttcgaaatcctaaaaaacgtcctcgaaatgttcgaaaacgcagccgctgatcaattagaattaaaagctgttgtaggcgatgacctagccgaattcgcagacagcttactaaacgaatatccagaagaaacatggatggataaacaacgctcaaaattacgtaattcaatcaaataaaaaacagcaagtctctccgaatataagagagacttgctgtttttttatttgcgtttcttcacaacttcaataaattcatctaatgtttcatgggcttttatttgctcgttacaaacatcgctatcgtagcaaatataattaccatttgtcgtataaacgccatcactggaagatttcgttttcgccataaacagtgatactttggaatgcgtttggcaaatggaacaaacacccttttgaatctccggagaaatagtcccatttacgccgaccaaatttccgtcctcataagtcacgatatatttacgctgctgagcaatatcattccagccgtaaaaagtataatcgcgcaaatcaagtttcgaccatgcaggaatttttaattttttcgttttcgcaaaaagttttttaagtttcacatcgctaggcggagcgaaaggaatcacataggcttttaacccttctaaaaacggctctgcttctttggttgaagttatcaaatggagctcgctaaaaagttccttatgctcttctagcacgctctccggaaatagttcgttgattttctcctccgtcaaagactttaacgccttcaaagtggatctatcattcgcggaccgataagcgcgtgaaacattttctatttgttttttgataaaattatattggtatggttcgataaactctttcattaataattctcctttaatagtttaattttggttaaactagctgaaggattgaagagtttatttcactcttactttctaaacaatcctaaagccattgttagaaagtcgagagcagtgcaattttgtttgcatctctttgatcaccaccttgccttcattataagcacttctgaattgttcgtcaattctttttcatgaatattcttccaaaaacagggtaaacgaaaactattggacattagagaaaacatccatgggaggagaaagtataatgaaaaaagtaaaagcaagtgaaacactcgtacaaacattaaaaaattgggacatcgatcatgtttatggtttacccggtgattcgattgataccgtggtcgatgcactcagaaaagaacaagaggcaattgaatttattcatgtgcgtcacgaagaagtcgcatcactagcagcagctgcctataccaaattaaccggcaaaatcggagtcgctttatctatcggcggacctggtgcgattcatcttctaaacggtatgtatgatgcaaaaatggaccacgtaccaatgctcgttttagctggccaagtgacaacggacgtcttaaatacgggctttttccaagaagttaatttaccagctatttttgaagatgttgccgtttataataaacaaatcgataatgctgaaacgctggcagatgttgttgatgaagcgattcgaactgcctatcaagaaaaaggtgtcgctgtcttaacaatcccaaatgatattccatcacaagaaattaaagcgagcctaaaagcaaaaccagtaaaatttgaacaagaaattccaaaactagacgaaaaagcaattcaagaagctgtaacattaattgataaagctgaaaaaccagtcattttagcaggcttaggaacaaaacacgctggaccagaattaatcgcttttgcagagaaagcgaaaatcccgattattcattctttgccagcaaaaacaatcgttccagatgaccacccaaacgcacttggtaaccttggtaaaataggaacgaaaccagcatatgaagccatgcaagaaactgatttactcttaatgtttggcaatgattatccttatagcgattacttacctaaaaaagctgaatgtattcaaatcgatattaacccggcaaaaatcagcaaacgttatcaagcgacagttggtttagttggcgatgccgcagaaataattagcaatttaacaaccaaaatagcaccggttgaagaacgtaaattccttcaagcatgccaagaaaatatgcaagaatggtggaaatggttggaagaagatatttcgcaaacaacggatccaattgccccagaagtcgtgatggctaatattcaaaaaatcgctgataaagatgctattttctccattgatgtaggaacagcaacggtttggagcacgcgttatttacacttaacaccagaaaatgactttatcgtatctgcatggcttggtacaatgggctgcggtcttcccggagctatcgcagcgaaaaaagcctatccagaccgccaagcaattgcaattgtcggtgatggtggcttttcaatggttatgcaagatttcgtaaccgcagtaggccttgatatgccaatgattgtcgtcgttttgaataaccaacaactatcatttattaaatatgaacaacaatctgccggagaactaaattacgcaatcgaccttccagacatcaattacgcaaaattcgccgaaagttgtggcggaattggtttccgagtagaaaaaatggcggacctagaagctgctttcgaaaacgccaaactagcaacaaaaccagttatcatcgacgtttccgtggatagcgcagccgctccactaccaggaaaaatcgtgatggacgaagcattaggttacaccaaattcgaaatccaatcagtcctagaagaccaccgtttcgccaaaatgccaccacttaaaactattttacgtagatttttataaaaaataaataaaaaaataacaatatcacccattttacgccgatattcgctagttattataatgtttttttattaaaactaattattttacaataaaatatggagtttttttaaaaaatatgagataatgaactagaattagagaataggagtgtggaatgggtgaatttaattaaaaatcgtaaattgaaaacaaaactaagcattaatattattataaccaccatcatgttaatcggacttggcgcaacgagtttccttggatttcgtcatgtagcgacactttcagataatatggttgataataatgttgctccaatgaaagaaatcgcaaaaatccaaacaaacatggcacaaatcaatatcgacatcctgaccatgttcgatactatcaacggaaaatcaacccttattaaagatattgatacgctttatgctgaaaatgaccaagcaatccataatttcaaaaaagccaatttaacagcagaagataaaaaacaattagcttactttgaagaaaaattagcagatatgaagtcagcagcatcctctgtcatcagtgatacttcaagtgcgctggacgacgcagaacttctaggagcacaaaatcgatattaccaaaatgttaaaacaaaatttgacgacgctacaaaacaattaaacgttttaaatgaaatgaactataatgaagtcgaaaaatcttcgcaagctatttctgattttggcgtaaaaattagtttaatcttcacagccgttatcattgctgtactgatttcactattcattttcaacgcttatattacacgcgttattttaaaaggaattcgtcacttgcaaacagctgtacataaagtagcgagcggggatttatcataccgtagcacatacaatggtaaagatgagctaggcgacatcacgaatgacctaaacgaaatgagcgaaaacctaagattaatgattgaagatattaaaaaagcttctacagacgttaaatcttccagtgataacgtcattattagttctgaaattatttctgcaatgacaacagagatggacatcgaaatgaaaatgatgggcgaacaaatccaaacgcaaatcggtagcatgaaagaaagtaccgatgcaatggatcaaatgacaggcggcgttcaaaacgttgcggaatatgccctgaaagtatctgacttaacaaaagactccgcagaaaaaacaaatgatggaattgctgttattaacaatttagtatcacaaatggatcgtatcagcggtgtaatgcgttcgagcacagacgtcgtatctcaactcgttaatcgtgttggcgaagtcgaaaaagcacttgataccgttacaaatatcgctgaccaaacgaacttgctagccttaaacgcagcaatcgaatccgcacgtgctggcgaacatggccgcggctttgcagttgtagctgaagaagtccgtaagttagcagaacaatctcgtcttgctgttgtcgacattaatacggtactgaaaaaaatccaaaccgaatcaaaaacaacaattgaagtaatgaacactgggctttccgaatcagaagcaggtcaaaaaatcatttctgaaacagaagcgacatttacagatttactcaaccgtgtgaacgatatttccgctcaaatgcaaaacgtctctcaagaaacagaagaaatggctgctggaattgaagaagtaaacacatcgattagcgatgtaacagaaatctctaaccaaattggtgaaaaatccacagccgcacttgaattcgcggaagttaacaaaatgaaagtggacgagctagtagttatctcagaagaaatgcaaaaaatttccggctcattagaagggtatatcgccaacttcaataccgaagtaagcgaagaagtggtcgaagtagaagaagaaccggaaacaaaagaacccggagagccaatcctagctgaaaatgtctaggtagcttgtacaaatgcgaatttggataaaatcactacttgttattacagcttgtatatttagtttgacccttctaaatacgaaatataccttttattcaccaaccgtcaaactcgaaagcgccaaagtagtttataaattagacaatgaaccttttaatgtaagactcgacgttcctatcattaatcaaatggatgcacctattctttttaacggctgtgaagtaacgagtcttgcaatgctcttacaattcactgggaaaaatgttactaaaaatgaattagcagcgaaccttccaaccacacctattgaacaaaacggcttacacggaaatcctgataaagcatttgttgggagcatcagtggagatagtaaagggctcggggtgaatcatgctcccatcgccaaacttgctgctaaatatgttaacgaagcgcatgtacatgacattagcggcaatgatataacagatattatcaccgtacttagcacaggagcacccgtttggattatcacaacgaccgattaccatgcaccaaaaaattggcaaagcgtccaaacaaaagaaggaaaaaagaaaatcacttattccatgcatagtgttgtcattactggatttgataaggagaatttttatattaacgacccatacggacataaaaatcgcgctgtaaaaagagctgtcttagaagaaggctggtctgccatgggaaaacaagctatttatttaagcaaaccataaaaaaacgtttggaagcataagcaagcttccaaacgtttttttatatttttttcttaatgaagagaacgactgctaagactactagaagtactccgataacaatcggccaaaccgaaaatgcatccccggtcgaaggtaaaagtgacgcattacttgtatgctcgagtgcataaaccgtgctcacacgaaaataaataaaacctagtgaaaaaattaaagcaatactagaaactattttttttgataaaaccatacggctcgctcctttttctatcataactatattattagtcatttgtttttttttgtcaatgtatagaccaattttaaacaaacggctatatataatgcttgacctagtatacatattattgtaaaatagatttgtttccttgaaaagtattgaaggaggatagtacaactgaatagaagcgccagaactgattgggacgaaaatgcttaaaggtgaaattcctggaaagtaaacaatcagttgacgaggaggagattaatcgaaatttcggcgggagtctcccggctgtgcatgcagtcgttaagtcttacttacaaatcatttgggtgaccaagtggacagagtagtaatgaaacatgtgcaagaaccctccaaggaaaccaaaaaatgtagagggcttgaaattggacaagtctgccctcaagttaattattggaggaatttattatgtgtggaatcgttggatatattggaacaaacaatgcaaaaggtattttattagaaggacttgaaaaattagaatatcgcggttatgactcagcaggaatcgctttacaaaacaaagatttagtaacagttgtaaaagaaaaaggacggattgcagaccttgcgagccttgtaccaagtgatgcatttggtacaacaggaatcggtcatacacgctgggcaactcacggtaaaccaaatcacgagaacgctcatccgcaccaaagcaaatcaggccgttttactattgttcataatggtgtaatcgaaaactacacgcttttaaaagaagaatatttaaaaaatcattcatttattagtgatacagatacagaagtaatcgtgcagcttattgaattatttgctgaaaaactttctacaaaagaagcatttaagaaagctttatcgttacttcacggttcatacgcaatttgcttaattgaccaaacggatacagaaacactatacgcagcaaaaaacaaaagtccattactaatcggaaaaggcgaaaacttcaacgttattgcaagtgacgcaatggctgttcttaaagaaaccgatgaattcgtggaaattatggataaagaaatcgttatcgttacaaaagacggttttacattagaaacattagaaggggaagaagtaagccgcgcaagctacactgcagaactagatgcatctgacatcgaaaaaggcacttacccgcactatatgttaaaagaaatcgacgaacaaccagcagtaacacgtaaaatcatccaagcttaccaaaatgaagctggggaaatcaatgtcgatcaaacaatccttgatgaaattttatcttctgaccgtattcacattgtcgcttgcggaacgagctatcatgctggtttagttggaaaaaatttaatcgaaaaaatggcgaaaattcctgtagaagtacatgtttctagtgaatttggctataatttaccgctaatgtctaaaaagccgttattcattttcattacgcaaagtggggaaactgccgatagccgccaatgtcttgtaaaagtgaaagaacttggttaccggacgttgacattaacgaacgtaccaggctctacgcttgaccgtgaagcagatcattcgatgtatctctatgctggaccagaaattgcggttgcatcaacaaaagcatataccgcacagatttctgttttagcagtacttgcagtttcacttggtcgcgaaattggtgacgctgaagcacttagcattaatttggctgctgaattaggtatcgttgcaactgcaatggaagcaatggtttctagtaaagaagtcatcgaacatattgcgggcgaatacttagcgacttctcgtaacgctttcttcttaggtagaaacatcgattatttcgtagcgatggaagcagcacttaaactaaaagaaatttcgtatattcaagcagaaggttttgcaagtggggaattaaaacatggtactatcgcgcttatcgaagacggcacaccagttttagcacttattacgcaagaatctatcaattggaatattcgtggaaatgtaaatgaagtcttagcgcgcggagcaaaaacttgtgtatttgcaatggagaacgttgcgcaaccaggtgaccggtttgttattccacaagtacatccattattaacaccactagcaagcgttatcccgtgtcaactattagcttattacgcagcacttcaccgtgactgcgatgtcgacaaaccaagaaacttagcaaaaagtgtaacagtagaataaagtattcaagaccttttctaatttcgaaaaggtctttttttatgcaatcaataaatttgcacgacccccttgttatactataaacttagagaggaatgggggaaatcagccaatggaagtatcacacgtaacactcgaaccaaataaagatagtcgccccgcagtattaacaatcggtaagtttgacggggttcatcttggtcaccaaaccattttaaatacagctttatccatcaaaaaagaaaacgaaattttaactgctattagtttcagcccacatccactttgggctttaaaacaaatcgaaatataccgcgaaatgctcacaccaagaatggaaaaagaacgctggctcgcgcattacggggtagaccatctcatcgaaacagccttcacaccaaggtatgcggaaacaacaccagaagaatttgttacggaccatttgtctaatttacaattatcgcatatcatcgttggttctgagtttaattttggaaaagggcgcgattctgatgtggatttactgcgggacctttgcaagccctatggtatcggcgtcacatctgtcccagtaattgaaacaaaccaaacaaaaatcagctccacaaacattcgagcttttattcggcgcggtcatttcctagaagcagaacaactccttggtcacccgtggtatattaccggaatggtagaaaatggtgaaatggtcggcttagatgactatgttcttcctgcaaccggcacttatcaaaccgacaagaatctcgtaaaagtgacgaatagcagaactatcaaagtagatttaccagacggactacaacaattacatatgaaaaatgaactttcctagtcattaggaaagtttttctttacattttataaaattagtaatatactaatttagtaaattactaaaatttaaaaggggaaatctaatgaagattccaactaccttaaaacataaaccagtgattgttgccgaaaattacgaagaagtagacggtaaaagcgcgtatcattcggatgcaaaaggtctttcgcttggtcttgcgcagtggaatgatcgtggaaaagtagatatttcagccaaagtttggcgtcatacgggcgataaatggtcgcgccaatccgaagagcttccgttacaccgcgtacttgacttagctattttaattgcaagaacgaaggttcattttaaagatgcttatcgtttacctaatttttacgataaagaaaatccaacgcttgatcgtatcggcttgcaaggagatgcgctgactatcgcagtttgtgaagataacgagtatatcgacgaagacattcaattattcgaacaagcattaaaaaatgatgatgaactactcagcgaacgcctcaagacacttagcaaacttttacaagaagcaggatactaaggacgtgaaacaaatggataaagaaaaccgcaaagagctgattcgcgcatacaaagaaaaagcccctgacgccggagtataccgttttatcagtacaaaaactggcaaatatttaatcgataatacaatggatttaaaaggaatagccaataagcttgctttcggagtgaaaattggagcaggaaatatgctaccaccagaaatggcaaaagaagcaactgaacatggtatcgacaccattcaatttgaaattcttgaaaaagtagacattaaacccgaaatgacaaaagaagatattaaagaagaaaatgctgtacttctcagtttatggctagaacgcgaagatatttaagacctctccagatgagaggtcttttttttatagttaaaattgtacaataaaaagataatttaaataaaaatacactaaatgtctacattttttgtgtgaattaatggtatactaataaatgactataaaaaagggaggttttacaacatgaatccaagaaaaccagaattcattctaacattaatagcaggaattacaggtattatcgctggtattacaggaatcgcaggtggaggtattcttgctgctttatctggtagcgaagaactatctggagctgcaacaatgtctactactgatacagaagcacttgctgctgctggaggtttcgcagtaattttatctgcaatcgctttagttattggtattgctttgattgttttcgcagtattaattaaacgtaatgcgaaagtatttggtatcttaacgctagtagctggcgtaggcggtttcttcttagttagcttactatggatcgttccaggcgtacttgcagttatcgcaggtattatgtgcctagcgagaaaagtacaaactttctaaaaggtgctttaaaaaaatagattgtaacaatgtgagaaatcattttgtttacagtctattttttttactaaaaaagcactgaaaatcagtaaatattcatcgattttcacattttattcacattttaaatataattcggaaaattgagtctaattttagtacttgttaattttgtgttgattgtatactggttaagtaccaatttcataaataagcgtttatacatctaggaggaatgattaactacatgaaaaaaacaatcacaatgtcgctactagtcgtatctctcgtcttaattagttttattagttctccaaacgccaatgcagccgaaaaaagtattttaacatcaccgaaaccaataaatgaggtttttcctgatgaaaatatggctaaagtaatagctgaagtcacttataagagtagttcagcagatgaagtatctcaggcagatttagataacattacaaagttagatggcagcacctctgaccgtatgccggggccaataatttattcgatagagggtgtcgagtatcttcaaaatttatcggaatttaatatttctgggcagtctgtaagtaatatttcaccgttagaaggattatcagagttagaaactgtatatatttctgaaaataatattaatgatttatcaccacttagtaaatctccaaaaataaaaatattagatgcatcgaataataatataagtgatataagcacacttagctcattgccaaatttaaattcggtaagactaaataataatagtataagtaatattagtgtgttaagggatttcccgacaaaccaatttgtttatatttatttggccgataataaaatcaaggatattagcccgctcgctggtaaatcgtttcaacaattaacacttaacaataatgaaataagtgatattagtccattaagtaagatgacactatattcagaggatccattggccgatgatttttatattgatattagcaataaccacattagtgatattagttcgttgaaaaatgctgattttggcaaattagattacttttttgcagaggatcagagtattgtcaatcaacccaaagctttttctacaaatttcacactggaaaataaagtgaaaaatatcaatggaacacttgtgacgccgaagaatattagtaatagcggtagttattcaaatgctatcttatcttggcaacttccaagcttcgtagcaaatctagattattctttttctgagacaactcagattggcaggtcaacaggggaatttagtgggaaggtcacacaatcccttgttggaggatatacagtaacctttgacaatgaaggaacactatctacaaggacttttgctagtgatgaattagtaactgaacccgcaaagcctagcaaaacagggttcacgttcactggttggtacgatgcaaaaactggtggaaagaaatggaacttcgctacagataaaatgccagcaaacaatatgacactatatgctcagtatgaagaacaaacaacagatccagttgatcctgcaagtccagttgccccaacaaaaccaacagatccagttaaaccggatgaaatagtctcctccgagggatcgggtgatatggagattaagggagaacaatctggaactatagcggcatcagaaaacgcaacttctttagatgactcaaaacaacaaagaacactaccaaaaacaggtgatactaacttatacttggtgctgattgggctattatttgttggatttgctagtttattttggaagaaaaaacaaatttaagccattcaaaaagacgataaaccgaggtttatcgtctttttttattaattattattcggatttacagctgattctttctccaaagaacagtggcagaacttaaaagcaagattcctactagtgaaggaattagtggactcttatcaccagtttttggaagttttggcattcctactgtgcttgattctgcttttgttatcgatttattaaaagttgttttgttcgatggtgatttttctgaactgtcttctttttgatatacaaaagtgacttttttcggtgtttgatcaaatgttccgagctcattagagggctctttttttagtgtgtatcctgttatttctttatgagtgattttatacgtttttccaatttctccttctactattaaaggattactgattggcgtgtttgtggaatcaacaaattctacttcgactttaccaatttttgcttttagtaaagatttgtctttagtgtacacgtaattaacgctttgtttagtatcagaaaatgtaccgttcgcatttgttggtgttgtagttagcttataaccttgaattgttttggcaaaagaagaataggaatctccaatattgccatctaagacagtttgttctgctaactctttacctgtatcgctcacataattaattgttacagactcagcaggaataatatttttagtgtaaatgtaattcactgtttgttggtctgctgttaattttccgttggcgtttgctggtgtttctactaatgtgtatccttcaatcgttttttctgtagaagtataatcatcgtctataaaaccagtgaatgtttctgatggcgctagttctttacctttatcatcaacatattttacagtaactggtttagcaggaacggggtcttttgaataaacataagtgactgtttgtggatcattaaaaaaagtaccgttcgcattagctggcgtttctgtcagtgtgtagccaggaatcgttttagcttcagacgtataatttgcttctaataaaccttttaaagtttcagaaggagcaattgtttctcctgtggtacttttgtattcgactgtgacatcggagccttctggaggagcttccacaacgattggcacccgtacttttgcaaatgggttggaggtagttgataaggtgcttttaatcgtaatgaaaccttcaccttctgttgtggctaccccgttttcaagcgttgaagaaccgtcgtcgtaatattcgaattcgtgagtagggtataacgcattatttgaagctaatcctagtttggatttatcaggagtcagttgtttaaagtctgttttgtaaggaactacgattggatcgcctttataaaccaattgatcttgcttttgacgataattgtaattctctaacatgtttccgccattattatagttatctaaataatcaacaggaacatctgaagtaatttgatttccttctgtatctataattagttggccactgcggctagcccatttagttgtaaaaatcttatcaggaatggaaattaaattgttattacgaacatcgagacttgataaatgggaagacatattcgtaatttcttcagggatttcactaatattatttcgttgtaatagaagcgaatttaaagctggtaggtcataaacaactgttggaaattcagtcagcttattattataaaaacttaaaaaggttagctttttgagttcaccaatactctctggtacttccgtcaaagttccttgtgttatataaagcctagttaaatttttatagtctgttatattatcaggtatagaagaggcgcctactggatcaagagaagtgattgtttctacatctgctagtgtaatatcttctcgttttttattgagatttctctctgttgccgagatgaaagcttcgttaccatctaattctgtttcaatccaggacgtcggttcagtattagcttttgggaaagtgaaggggacgagtgttgcgagtagcatggagcaaatgaggattagaaaagtttttctcaagaggtattgcacatccttttataatttgttttattatttatgagttaattatagtccttttccacattttcgtagtactaaaatcagacctataaaacgcgtatgatttcttaaatgtgaatatttggtgacgaaatcacaaaaatggcgaaaaacagggtttgttcaaatttagacccgatttaacttttttataactattttggatgctgtttagactaaaggagactatttagaaggcattgatttgaatgcttttttgaattggaaaacaagtggtatcaacgtgttattaggtttttcttctgtggatacttgttttgttcatgaaaataattttcgattttttgaggtaaatgtgtcaaagaaaagtgcttgaaaatcaaaagacacattgcttttatgatataaaatgttcgaaaaatgttcacaaatggtgattttaggtaccttattaggcatttttacaatattgtttagcgtataattttaggagtaatcaaaaacactggaggttatacattaatgaaaaaagctttactttgtctttctgctgttgttctctcattaaattttgtttggggttatcccatttccggaatagcatcagaaacaacaaaagaaacaaatcaaccaattaatttaaatcaaagtaatacagatattgttacttctgaagatttaggaggacaagcgtggttaatcaatgaggtaaatagacaattggcgccgaaaaaagtcggtgttgatctaacttttgaggatttggctaagattaagaccatttctttaagcaataggtcgcttacgggagaagtcccaccagagattaaaaacctagtgtctctcgaaagacttttactttatagtaataatttatcaggggagattcctagtgaattaggtcaattacaaaaattaacagaactgcgcttagattataatcaattctcaggaaaaattccggatggtcttggaaatattccttccatcgctttgcaaggtaataaattagtcgggcaactacctttaagtttgtatgaaaatagaactggcgcaaatgaagtaaatgtttctggtaaccaagtgacgattaacagtcaaaaaccagaaccaagtgtttactcagcgtatacgttcatttatccagctaatacaccagagtatagcggtcatattaaagcaaataattcttttatttctaatctaactaatgatatggagcttacgccatttttaaaaaatagtcctacatttattaatttacaagtagtatatatgtttgactcggaattgtttgatgggcatgatgtgacgattaccgatacgaatgatggcaaggtgctttatgacggggcgctgacatcggatattagcattccgttaacgaattttaaatcaggcatacatgtaattaaagtagttcttgataatgcgactaacaatcctcaaaaccaagcaacttttttaattgatattttaccagttaaggcaaaggatttaacggttaaatatgtggatgaaacaggagcagagattcacgagtcgcaaacggtaagtggtaatgtaggcgatgactatgatgtgacgacgcctgaatatgaactagcaattgataaatacgaactcgatactaaccaactaccaggaaatgcaaccgggacacttagtttagatgagcaaacggtcacttatgtatacaaaaaagcagacggcgcaccagtcacagtaaaatatgtaaaccaaaatggcgaggaactaaccacttcagatattttaacaggtaaattagatgatacgtatcaagctgaagcaaaagaaattgctggatttacattagatgaaagcaaactgccaacaaatacaagtggcgtattcgaaacaaactcgcaaacagtcacttatgtttatcaagcagtacctgcgaaaattaaagcgcacgattcgacgatttatgtagacgatgcatggagcggagaggacaattttgatggtgcgatagattcagtcggtaccgctgtttcctttagtgatgtgcaggtggacggtgaagttgacaccacgaaagcaggtatttatccggtcacttatagctttggcggcgaatcaataacgattaatgtaacggttaaagaaaaagccgttccagcgcctccagttacaccgctaaaccctgtagtaccagcgcaacaaaataacgaaactacaccagctacaaaccaccaaacttcagcagaaaagacagaaacaataaaaataacgccaactcaaagtgaaaaatcaactatagctggtaaattaaaacttccaactactggcgataaactttgggatagcgttttgtatagcatgtttggcttaatatttgtatttgcagcgcttggattattgcgccgtaagcacaaacaaaattaaatgtctaaggagtccttatctatccgataagggctttttttattgactaaaaattcttcttccacaagctctgttagtaaattagatatgtttggctgggttgtgcggcaatatcttgcaaggactgactgattgataaagtttggtaacacaatctcatttctttcttcatcttcagtgcccatctctacagcaagattttctaaagccatgtaaatccgttctttcggcgtttttgcaatcataccaagaagcgcatagtgacgagcaaaaacgtcagcaatacttgtcaaaagaaaatcattcacatcaggtttgaccgataaaatgtttagtaaaaagtctgcttctattttatagagcaccatttgctcactcatgacggtaatactatgttttttctttggaaatgacgagaatgcatcaatccctaacacattatttggaagaacgaatattgaaatatagtttgtttttcttaaattgtcctctaattctaccgcagcataacctttcacaacaaaaaagatatgttttgctttttcttgttcaaaaataattttttcattcattgtataggttttctttgttacatatttatagtagtcaggaaattcttttagataactgagcactgtattgaatttttccgtcattaggaccactccttttttacatatttacccatttattataccttaattcttttcaaaaagagttatgaacagtttgtgactcctgctaaagtcgcttggagagagggataaaagtttgaaaagaaattttgtagtgggaaaaacgcttgctcgatatatgaagtatataaatgaagcgattttcctttgatatagtacattcatagccagtgtgacccaagtggtacggtgatacggacagacaggcgaaaggaggaaattatgaagtttgatgatagtaaacccatttataagcaaatcgttcattatattcatacagaaattgttacaggaacatacgaggctggtgacaagctactatctgtaagagaattagcaacaaagttagaagtaaacccgacaaccatccagcgagcttatgcagaactggaagaagcgggaattattttcaccgttcgcggtactggtaaatatttgacagaagataagaggagaattgagcaattggaaaatcacatcgcaaaacaacttaccgaaaattttattagtgaaatgagtaaattaggaattaataaagaaaaaatcatcgcttgggtgaaaaaagtagaggaggtagaagtaaatgctagtgggaaataatattgctaaatcttatccaaataaattagtcttacaaaatgtggacttcgaagcaaaaccaggcgacatgatcgtgctcactggtgaaaatggcagcgggaaaacgaccttgctagatatgttagcaaatttgaagaaaccagatagcggcaaattacaactagataatgaagttttcataacgagtgaaatccgtcagcaaatcgcttatctaaacaatgaactttacgctaaaaaaagtactactatagaagaatttatgaaacaacatgcgcttctttttgaaaatatggatttagataagtgggaaagactactttcaggatggcgcattagtaaacgtttaaaacttggtgaattatcgacaggcatgttgatgaaagtgaaaattgctagtgttttagcaagacaagccaaagtgtatctttacgatgaaccatttgcaagtattgatattatggctcgttcagaagtaatgaaggctattattagcgaaacagagccagatgctatcacgattatttcttcgcatcatttagaaggcacggaaaaattatataacaaactttggttaattaaagataatacattaaaaacaatagaaacagaaacttatcgcgagagaacaggcaactcattaatcgatttctataaggaggaaatgaacaaatgacaaaaatgattactttttatttaaaacaaattagtcctattcttttgattggacttgcaattatcttggggctgaactttctagggttcacgataaatctactggagggaacggatttactttttagagcgattcgaggaacgacggtgataagcttaattctcgttcttatcacaacttggaaaatcacgaaactcgacacatcgaaagaaaacttaacgctcgcttctctttccggattttcggaaacaaagaaatttttcggaaaactatttgctgcttatttatcagcaattgcagttattttacttcaaagtgcttttatttggtattacggttttgaaacaggacgaattggagcaggcgatgcgttatcgtttgtatctggaacgctgatgatgtttttatttatcgctatgtttgtttgttactttgttattccggtaggttggttaaaagatcacgtgaaggctagttctcttcaaaaagcagccgttgttctacttctttttgcaatcctaataatcaatttattagctgaatactacttgcatatttataacagtgcgggaattatctctattttgccaaatggtcattttgagatttcacttctttctattgtttggaatgtaggattatgttcagttattgcaggcagttatatctatatgaagtctaaaaaaatggatactatttgaaagtaggagaatacatgttagaaattaagcacttaaaaaaatcttacaaacttggaaagaaaaacgagactcctgttttgaaagatattaatgtgacgattcaagacggggaatttgcggcaatcatcgggaaaagcggtagcggtaagtccactttgctgaatattattagtgggctagataccgactattccggacaagttttatacaatggcgctgatttacaagatatagacttagacgcctatcattttaatcatattggttttatttttcaaagctttcatttagttaaacatatgtctgttattgaaaatgtcaaagttcctttatatttgaatgcctaattatcggaaagtgaccgaaatgcgagagcactaaatttgttgaaacaagttggattagccgaatttgctagtaaaaaaccaacgcaactttctggtggacaaaagcaacgggtagcaattgcgagatcgcttgctaacaatccagatatgattattgcggatgaaccaaccggagcgcttgatagtgtaacttcagaggaaatcattaagctattaaaaacgttagcgaaacaaggaacaacagtcatcatcgtcacgcatgatttaaatattgcagaccaaaccgatgcggtattacgactagcagatggagaagtaatttcatttgaacggaaaaaagaagttatccaaagagttagccacaaaaatgaaaaaaagttgcgtctaaactggtgggccactgctaaaatttcttttaaaagctttttcaatagaaagtttcggaatttgctcgtagcacttgggacttcaattggaattatcgccattttattagcattcgggcttgggaatggagtaaatcaaagtctttcaaagatttttggaacgactttttcacctaaccagattacgacttattataaagaagatggtggttcgaaatcacctgaaccgactactccattaacgagcagtgagattaagaaaattaagcaactgtatgaagatgaaaatattacagaaatttatgaacgcactactgtccaaggcattaaatttgaatacgatagcgaatatttgaaaggtatttctggtgaaatgcaagaagccaactttaagccatcacgctatgaagatttgacggtcaaagatgaatatcttctaagtgggaaaatggtgacaagtgatgaagcaggagcagttatcccttctaatgtagcaagagctattcttgggaaaaaggattctgatgacttaacaaaaagtgacggtgataaactcattggtaaaaaaataaccttagtttatgccggaagaaacagcgacacaaaaaatacggtcaaaatagaaacaaccatttctggtattacaaatccctctaaagaaggttttgctaggggatttgacgtttctacaaaaacaatgaatgattttattaaaacaactggtattgaaaaaccgattttatctgtagatgcattcacaaaaacaacagcacaagcagaggaaatcgttggaaaatatgaggatgacaaagactgggcgaattattcgattactaatgcgaatgctttcgtagatacatttagccagtttaccgatattattgtgtacttgattgcctttattgcaggtctttcgctggctgttgctggcgtgatgattgctattgtgctttatatcggtgtggttgaacgaacaagagaaatcggggtattccgagcaattggttatcgaaaacgtcatattcgcggacttttcatgatggaagcaagctatattattattttagcaaatgtactatcaagtcttgtcgccgtgacaattgcaaaaatagcgagtcctattttagaaacgaacattggttttgaagatatgattcacatttcgttctggaatttccttgtcacactcgcaataacaattacaattggctttattttctcgatttatccaagtaataaagcagcaaaattagatgcagcagaagctttaagatcagaatgacccaactaacagaaaagaggaatttaacatgaaaaaatcactaaaaatcagcttaatcgtcgtaggaatcgcagtagttatatttgcaggagtgatgctatcctaccgttttattaaatcaatggacgttactgaaaatgccgaaataaacaaatcagctacaggagatcacgtattgctggcaactcaaggtagtaaatttaaagacagcgtaatggatcaagtgaaaaaagacatggaaggcaaaaacgtacatgtttcgattatcgatacaacaaaactagacaaagtaaaagcagatgattatgacaaagtagttctattcactacagtacagtccgatgatattccagaaaacgtaaccacttttatgaatgataataaagataaaagtatccatattgcggtaacagcagattctggccgctgggatgataaaccgaaagatattgatgcaatttccgaagcatcgaaagcagaaaacaaacaagattttgtcgatgatttaacgaaagcaattgtagcggaataagaatgagagagcactcacctttaggggtgagtgttttttaatatcagataaatttgctaaaaacgctatatcgttattcccattttaaaatatgctatacttagggacaaataaacctcaagaaaaaggcgggtggtagtcattgaagaagagtagaacggttcaaattcttttcgttttttccgttattgcgctagttgttagtgttgttggtgtagcgtcaatttggtacgggcaaaaaaatcatcaagtaaacaatacaaattcagctgcccaaaaagatactactgtaacgaaaaaacaagatacctttaaaataactgcactcggcgactcacttacatatggcgttggtgacacagaaggcggtgggtatgttcgggttgtggaaaatttctataaacaaaaagagaaaaatgtcgagaacgtcaatcttgctattagcggggcgaaatcaggacaattactcaaacaattggaacaaaaagaagtacagaatcaaataaaatcagctgatgtagtcttaatgacaatcggcggcaatgatttatttcgcggcggggaagcacttgatgatttcaaaagtgatgcgattaaacaagccgaagcaagctacacgaataacttaaaacaaatttaccaaacgatacgaaaattaaatccatccgcgccagtttttcatattgggctctataatccgtttatgtcgttagaaaatgcgagtgagatgtcggctgttgcgaatgaatggaacatgcaaagtcaaaatctatcacaaaatgagaaaaacattatttacgtgccaacatttgatttatttcagcaaaatggagcggcttatttagcaagtgataaattccacccaaatcatgcgggataccagtttatcggtaatcgggtgacagaagtgatacagacgggagggggaaaaggcgatgacggagctagcacttcaagtaactaacctgcataaaaaaatccgcaaacgagaaattatcaaagggatttcttttgaagtacgaccaggagaagtattcggttttctaggaccaaatggagcgggcaaaacaactacgattcgaatgatcgtggggttgattaaaccaacatctggaacgattttaattggtgggaaagatattcggaaaaatttcaccgaagcaatgcgcggtcttggctctatcgtggaaaatccggaattctatacatttttaacagggcaagaaaatttggcgtattttgcccgaatggatccctcgataaaaaaagaacgtattcaggaagtaaccgagctagttgggctggaaaaacggataaatgaccgagtttccacctattcacttggtatgcgccagcgtttaggcattgcccaagcgttactttccagtccgaaattattaattcttgatgagcccacaaacggtttagatccatctggaattcatgaaatgcgcgactttatccgtgcgcttgccagaaatgaaggaattagcgtgctcgtttcttcgcatttattaagtgaaattgagcttttatgtgatcgggtggcgattatgacagacgggacgattattaaaaccgaccaagtttcacacctccttagttcccgcgcacaattacgctggctggcgactccttttgaacaagccaaagcatttttggcaagtgtaaccgaagtcgaagtggacggcgaatatctcgtgaccgcagtgaatgaacgtagcgccgaatggaacgaacagttggttgcaaaaggcattcaagtccatgaaatcgacaagaaaaaaccatctctcgaagacctatttcttgagttaacaggaggtcattcgattgattaatttagtctataatgaacagctaaaactttggcgcaaaaagcgactcatcgttattttagcattggtagcaattatcgtagcgattttcacgtatgcgcagttccggcagtatcaagaagatgaaaagcaagctgggacaagtgattggcatgtacagactcagcaacaaatcgtcgaccttgaaaacagactcggcacagggcgactacccgaagaatatcaaaaatatttcaaagtgcttgtcgggcaactacaatattatttagataatgacatcaatcccaatgcacctggagcaccaactttcttaaaaacgttcgtcgaaaatggtattagtttgttgtttccactttttatcatggtaatagcagccgacttaatcagtgctgaaacaagcgccggaacgatgaagttcctgcttacaaggcctgtgaagcgatggcggattttgacgagtaaatatatatcgatgctactctcgatttccgcaattatggtattatccgccgttattgcctacctgatttctggaattgtctttgggtacggtggctgggatgcaccagttctcaccgggtttggtgtgaaagatggcgcgataacgacaaccaatgtgtaccagcttccggtttggcaattactgctcatggagttcggactcgcatggtttgtcagtgttgtggtcggcgtgttgacgatgtttgtatccgtgctagtccgctctacagccgccgtgatgggaattatgcttgcttcactcattaccggaacgattttaaccaatctcgtcagctcttggccaagcgcaaaatatctatttatggtcaatttacaactaacgaattacttgaacggctccagtccacccgtcgaaggaatgacattgaatttctcgatgcttgtgttaacagcgtggatggtagtcgctttcatcttatcctattttattttcacaaaacgagatgtgtattaaagagcgcttaacggcgctcttttttgcgtacattaaaagttacttactttttgtgagcataaaacttttctttttaatagtttagttataaactatagttagtaatcaagaaggaggtacaaacaaatgattaaaggcattcatcacgtatccgcgctaaccaaatcatttagcgagaaccatcatttttattcagacatattagggctacggctcgtaaaaaatacagtaaatcaaagcaatattcacatgcgccacctattttacggggactatacaggaagccccggtaccttgttaacatttttcgaagtacctcgcatcggctcaagctacaacgagcgcgcctttttcggtaatatcacccttggaataccaaaagacacaagctcttactgggaaaaaaggctaaacgattttgccatttctttcaaaaaacaagaccagacttttagattacaagatcccgatacaatgggcataatcctaacggaaataccagaaaccatttctaacccaaccattcacaccgatataccagtcgaaaaacaaatcgttcgaattatcggcgcagactatcacgtaccggacccagctgcatctagtcaatttttcacaaagctttttgggttaaagcaacagaatggggtaatagtagataagagtgaaatgagttttatgaaattgtacgctactaaatcagacaaaaaatcccgcacaggacgcggaacaatcgatcatattgcatatactttagaaacgaaagaagctgttgatgaacttcatgatttagcagtaaaaaacgacttggaaattgaagaattcgttgaccgtgagtattttaaaagtctctatatccgcgaaccaggcggcttaagaattgaatttgctagcgctggccccggttttactatcgatgaaccacttgaaacaatgggcgaccacttagccttaccaagctttttagaagaaaaaagaacagaaattgaaacttattttggaggagatttatcatgattaaagggttaaaaggaattcaccacgtaacagcaatgacaagtagtgccgagaaaaattatgcgttttttacagaagttttaggaatgcgattagtgaaaaaaacagtcaaccaagacgatattcatacgtatcatttgtttttcgcagatgacaaaggttcagcaggaacggatatgacgtttttcgactttcctaatttaccaaaaggacgtcacgggacagatagtatttctcgcgtatctttccgtgtaccaagtgacgcggcgcttgaatactggcttgaccggtttgaccaattagaagttccgcatagtgacatccaaacattatttggcaaaaaatatcttaccttccaagactttgacgaccaacaattacaactaatttcagatgaaaataacgaaggagttgcagcaggaactccttggaaaaaaggaccagtttcagaaaaatatgcgatttacggtttaggaccagtatttttaacagtagtttcgctcaaaaatatggaagcaattttacaaactatttttggctttagaaaagtgacagaagaagatggacttcatttatacgaagtgggtgaaggaggaaacggggcgcaagtgattgtggaagaacgtaccgatattccagccgcgatgcaaggttatggtggtgtacaccatgtagctttccgcgttgatgaccacgaggaattacaaaaatggattgaccgcatgaatacaatcgaagcacccaactctggctatgtaaaccgcttctactttgaatcattatatgtaccagtttcagaacgaattttatttgaattcgcaacagatggcccaggttttgcaggcgatgaaccatacgaaacacttggtgaaaaattggcattacctccatttttagaaccaaaacgagctgaaattgaaaaaatggtccgcccaattaacacgaaaaggagctgaaaaacgtatggaacacatttttattcctggaaaaaataacaatttagcaccgttattactacttcacgggacaggtggcgatgaaaagtcgcttgttgaaatagcggaatttattaatagtgatgctgctgttttatcattacgcggagatattaaagaaggcggagcaaatcgatttttcaaaaggtttcatgatggcagcttagatttagaggatttggagcttaaaactgcagaattaagcaagacgacacgcgagttagcggagcaatatcaacttgattttgaacgaatgattgcagtaggttattcgaacggtgccaatattgcagccaacgcgctactacaagcagaagatagttttcataaagcaattttgtttcacgcgatgccagctggaaataaacaacccgagttttcaattagccaccgcaatgtatttctgtcagccggcttaaatgatccacttattaccgcaaaagcatccgaagaattagtggaaatcctcgaaaaacggggcgcgaaagtcgaaacagtttggacagctgctggccattccttgactatggaagaactagaagaagcaaaaaaatggtatcaaaacaaccagaaatgaggtaaataaatgactgtttttcaaagtgcagatttaacccaaaaagaaaactataaatttttaacaggaagtattattccacgaccaattgcttttgtaacaacgcttgctgaagacggggagacggttaacgccgccccgttcagtttttttaatgtcgtttcgagtgatccggcgatagtatcgattgcggttcaacgcgcagatggcaagcaaaaagatacagcgaggaatgcggcttttacgaaagaactaaatattcatattgttagtgagtcatttgtggaagaaatgaataaaactgcggcaagacttgcaccagatgtaagcgaaatcgataagacaagcttgcatttagagcaagttcctggaatgaaaactccgaagatttccgaggccaatatcgtgcttacagctaaactagaacaaattattccaattaagaatgacgctgatgaggttgtttctgatttaattctggcacgtattttgacgtacgattttgcagatgaagtgtttgacgaaaagcatcactatattttaccagaaaagcttgaaccagttgccagactcgctggaaatgactatacaaaacttggcgatattttccggattgaaaggccaaactaacgagaaatagttgcgaaacaaaggccatcatgttaaactaggggcatctaaattgaacggagggttgcccatcatgcgttatattagactacgtttcccaaaaaatctatgcaactaatttaatagtgcgggaatatccatgcttatttagtatgggtaacgggattggtcttgcgtgcatgtatggcacccaaaataaatatgggtagaatgaaggcgaaatgctttcatttgaaggcaagctagtatcttttgatgctgtttttgtgtttttatctactcaaaaaccctgaccgcgctgaatctatttcaggaggtccttttttatggaaaaaaatgtattaatcgttggtgttagccaaaaacaaaaagattttgattattcaatggaagaattagccaatttagcggctgcaaataatatggaagttgtgggcgaattacgacaaaatatcgatcgtgaaaatcgtgctacttacgtcggaaaaggaaaagtggatgaaatcaaaggcttagcagaaatgcaggatgctcgcttgattatttttaacgatgaactttcaccgtcgcaaattaggaatttagaagaagcgctcgagcttgaggtaatggataggactgggctaatactcgctatctttgcaaaccgagcaaaaactaaagaagctcaactccaagtccaaatcgccaaattacaatatgaattaccgcgaatttttggacaaggggaagatatggaccaacaaagcggaaaaggcggacttagtaaccgtggttcgggtgaaaagaaaatcgaaaccgaccgtcgtaccatcaaacatcaaatccgccatttacaaaaagaactagacatgctcgtagatgaccgcgaagtacgtcgtcgcaaacggaagaaaaatgagattcctgtggtgtcacttgttggatataccaatgctggaaaatcaacgacgatgaatggtttagtgcgtgcttatagcgaaactgcggacaaacaagtttttgagaaagatatgctgtttgctacgcttgaaacaagtgtgcgcgaaattgttttaccggataacaagcaatttttactcacagatacagttgggtttgttagcaaacttccgcatcaattagtgaaagcattccgctccacactagaagaagcacgtgatgcagatttactcatacatgtggtagattattccgatccgcattataaaacaatgatgaaaacgactgaagaaacgttgaaagctgttggtgtggaggacgttccagttatttatgcatacaacaaagcagatttgatagaaggagaaatttatcctaagcaaacggaaaatacaattgtcttttcagcgcgcgaagaagaaagtttggaatttctaaccgaagtaattcgtaaagaactttttgctagctatgaaaaagcgacctttttaattccgtttgaagcggggaatgttgttgcttatttaaacgatcatgcagatgttttagctactgaatacttggaaaacggcacagaaattgtggctgaaattagtccagccgatttacagaagctagcagaataccaagtagctgagtaaagcgagttccagctgaatttgctataatgaaacatacagcaaatttagtgaggagatttctagctatgaaaaaaactggatggggtatacttggtgcagttgctgctttcacaggatatgcatactggtcaaccaaacatttaactgtaacagattatgaaatattatcagataaaattccggcagaatgggacggcgcgacttttgttcagctgtctgatctgcatagtgcgagttttggtttatataataatcctttgcttagtatcgtcaatgaactagcgccggatgctgtttttttaacgggagatatgattgatggtgatgagtctccttttgtaacaatggcagtcgtccgtaaattagcaaaagaatttccggtcttttatgtgagcggaaaccacgaaggtagaagcgcattttatgaagattttaaagcggacatggaaaaacatcatgtagctgtccttgaaaacgaacgctattttctgagaaaagatggtgcggcaatcatggtagctggtgttaaagatccgcgatttgttagagatgattgggccgagaaagaattgcctaaacaagtttgggaagaagaagcattaaaagaagcgctagatgaggcgacagctaatttatccccggactactttacgattctactcgcccatcgtccagaattttggccactttatcaagcttatccggttgatttagtattgtctggtcacgcgcacggcggtcagtttagactaccactcacagaaggactttttgctccaggacaaggctttatgccaaaatggacagcgggactccactcagctggcggaaaatcgcttatcgtcagccgtggtttaggcaatgttactaagctgccgcgtctatttaatgatccagaaatcattcgaattacgcttaaagcaaaaggggatgctagagaaaattgatttatttagacaatgaagacgtgcttgaccaagcatataattttgcaatggaagaatatgcgctccgttttttggatgaaaatgaaacttattttatgttttaccgaatgaagccaacgattattgttggtaaaaatcaaaacacattagaagaaatcaatcattcctttgtaaaagaacataatatcgatgttttgcgccgtttatcaggtggtggggcagtctacaacgatgaaggaaatattagttttagtatgattacaaaagacgatggaaatagttttcaaaactttgccagattcacagaaccggttattcaagcactccaaaaattaggtgtaaatgccaaactcagcggaagaaatgacattgaggtggacggcaaaaaaataagtggtaatgcgcaatttgcaacgaaagggcgactttatagccacggaacgctactttttgatgtggatttatccatgttagaacaagcactacaagtcgatccagaaaaatatttatctaaaggcgttaaatctgtgcgcagccgtgtgactaccattcgcgagcacttagcagaagatatggatattcaaacctttaagcaaattttacttgagtcgatttttgaaacgacagatataccgaaatataatttcaccgcggaagataaaatcgaaatagaaaaattacgcactcagcgctatcggaattgggactggacttacggaaaatccccaaaagcaaccatcaaacgcaaaaaaagatttcccgctggcactatcgaatttcagctatctttaaataaagggcaagtggctgaagcgataatttatggtgatttctttggtacagaagatgttagtgagttagcagctaaattaatcggttgccgttttgagcgagctgcagttcaacatgcttgggaaaacctaaatacaaaagcttattttggtaatattgaaaaagaagcgatattagatatgttgtttgaataaggattaaaactctgagatatagattctcagagtttttttgtgtataaaagaaaacgatttcatttttatattgacagaaattaaatatatatagtattatttaaatatgataaatactaattaagtataattaattaaaaggagtgaataatttggttatcgcaaaccgcgcttttatacaaacaagcaccgaacaaataaaaaaagaactaaataatcaaaaattagctgacatgtatgaaaagtgtatggaaaacacattagacaccaccattaaaatcagggaaaacggtctcacatttattttaacaggggatattccggcaatgtggttacgtgattccgtatgccaagtacgaccgttcctgcttttcgctaaagaaaatgaagaaattgagtcgatgttgattggtcttagcaaagaacaagtccgattagttggaatcgatccttatgctaacgctttcaatgaaacgccaaatggagctgggcatcaagctgataaaacagaaatgcatccacaagtatgggaacgaaaatatgagattgattcgttatgctatccgattcaattagcgtactttatttggaaaattactggaagaacagaacaatttgacgctgcatttttcaagatgttacaaacgatttttgctttatgggaagtagaacaacatcatgaaacaaaatcgccttatcgttttgaacggctggactgtgttccttctgatactctaaaaaggaacggattaggaacagaaacagcttacacgggtatgctttggtcaggatttagaccaagtgatgatgcttgtgaatatgggtaccttatcccttcaaatatgtttgcagtagtagttttaggttatgccaaagaaattatagaagctttttatccaagcgaagtagaaacgataaaacaagcaattaccttacaaaatgagattcaattaggaattgaaaaatttggtacatataatcatccgacttttggtgaaatatttgcatttgaagtagatgggcttggaaatcaattattgatggatgatgccaatgttccaagtttactttctatgccaatcatccaatatcttgagaaagagtcgccaatttatcaaaatacgcggaagtttattttaagtaaatcgaatccattttattttgaaggtgaactggcaaagggtattggtagtccgcatacaccagcaggatatatttggccaattggactggcgattcaaggactcactgcaaacgatacatcagaaaaactggagattttacaaatgttgttaagaacggatgcagggactgggttaatgcatgaatcgtttcatccagatcacccggaagactttacgcgtgaatggttttcatgggcaaatatgatgttttgcgaattaattcttgatgtagctggatttcgaatggcaagtgttttaaagaactaacgaaggaggcttaatgatggcaacgattagaaataaatctgttcaaatacatcaacaacgaatggcttacctttttattgcgcttccagttttattactagcgatttttatgattcttcctattggaatggctctgtttgtcagctttacagattatgatattgttaattctcccaactggatcggctttgacaattacataaaaatgtttagagatccttattttctcatttcattaaagaatacgattatctacacagccttgtttgtaccacttggtcttgtagcatcgcttggggctgctatcttgattaatatgaataaaaaaggagcaggtttgtttcggacatttttttatgtgccggtattatgctctacggtagcaacagcgactatctggtattggttgcttaatccgcagtatggtttgattaatcgtgttttaggatggtttgggattaatggtcctgcatggctttatgattcgaactgggcaatgtttgcgattgtgatgatgagtgtttggatgacatttggaacaaatatgatgatttttcttgctggtcttcaaggcatcccagctaacttatatgaagcttctaaaattgaaggcgcttcaagatggaaaacgtttcgttatgtcacttggccatccctttcccgaactacttttctcgtaacaacgatgctaattatcaacgcttttcaggtgtttgatcaagcatatgtactaacaaaaggcggcccaggaaactcaactatcacccttgtctactatatttacaatgaaggctttggaggattaaaaatgggctatgcttccgcgatttcttttgtactatttttaatcatactagtattttcgattattaatatgcgtgtgaataaagaagatagaacagcttaaggagggttggtatgaataccataaaattaaaaaaagggagcaagtcgttcatttggtatattgcagtacttctaattagtttagtgactgttttcccgcttatttggacagtatctacttcctttaaaccaacgagtgaaattttaagtaatagcatgaatttaattcctaaaatgtttacttgggataattacaaagatgtgtttagtacaaccccatttgctcgctatctagtcaactctttaatacttgcagttggtggagtgctcactaatttattctttggctcactagcagggtatgcttttgctaagctaccttttaaagggaaaaaaggtctttttatgacatttttaggaagtatgatgattccagctgtagtaacaatgattccatcgtttttagtattaaagaatttcccgttgatgggtggtaatgatattactggccatggtggaatgggttttattaatacttactgggcaattttgattccaggagctgctggcgcgttttcgatcttttttatgaagcagttctttgaaactttgccagatgaactttcggaagctgcaagaatagacggttgttcggagtttaaaatcttttggaaaatctatatgccacttgctaaaacagcacttgctacccttggaataatgacatttcaggctggctggaatcagtttatgtggccattgattgttcttaattcacaaaaaatgatgacagttcaagtaggacttgcttcctttcaatataacgaaagtgccaattatggggctttaatggctgggacaatcgtttcgaccattcctgtattgtttgtttttatttttgcacagaaatattttgtagaaggtattgcgcataatggcggtaaataaactaaaaaggagtgtataggatgaaaaaagtattgttagcaattcttagtatggtattgttgctcagtttagcggcttgtggtggaggttcagacagtagtaaggataaggacggaaaagaagaaattgttatgtggggttcttggtcaggagatcagattaaacagttagaaaaacaaatcgatagttataataagtcacaagataagtataaagtaaaatatgtaatgcaagaaaatgtggaagaaaaattattaaccggaattgcaggtggtgaactccctgatattattatgtgggatcgctatcaaacagctctttatgcaccaaaaggagtgcttgaaccactagataaacttgtcaaagaagacaacgtgaagatggacgatttttatgaagaatcggtgaaagaaatgacctatagtgataaattatatggtttaccactattaaatgataatcgaattctattttacaataaaaaattattacaagaagctggcgtaaaaccaccaactacatgggatgaattagcaaccgctgcgcaaaaaacaacgaaatgggatggaaataaaatgacgcaagcaggaatgtcgcttcaagatgttggcttgtttaacttatatttaatgcaagcaggtggcgaactagtaactcctgataataaaaaaacggcattcaattcagaacaaggcttagaagtacttaattactgggataaaatgcaaaatgatttaaaagtgtaccaacgtggttttgatgatggttctgatgcttttgcagctggaaaagaagcaatgacatacaacggtccatgggctttagcggattataataaagtagagaatcttgattacggtgtagtagaaccgccaaaaggaccaaatggtgataaaggcgcgattatgggcgggtttggattagtaatgcctaaacaagcggaacataaagacggcgcatgggactttatgaagtggtggacaacaaaaccagaaaatggtgtagagtttgctaaaattagtggttggttaccagcgaataaaattgctgctgaagatgaatattttacaaaagaccccaattattctgtttttgtaaatacaatgaaatatgctaaaatccgtccaactgtggcaggttatgcagatgtagaaggtttagcaatgaaacctcaatttgagaaattcatgaatggtaatatttcagcggaaaaagctttatcacaagctgaaaaagaaggaaaccaaattttaaaagaagagagagataaataaacgatgaaatggtccgaatatgcaaatttagctcaacaaagtttagaaaaattttatcttgcggatacaaaagaacaatttttaaataacttttatccgacagaaaatcctgaagaagataataaggtttttaattattggtggctagctcacttggttgaagtacgattagatgcttacttacgcacgaaaaaacaagcggatttggaggtagccgagaaaacatatctgcataataaaaacagaaatggtggaacacttattcatgatttttatgatgatatgctttggaacgcacttgcggcttatcgtctatataaagcgactggaaaatcaatttatttagaagatgcacagttggtttggcaagatttagtggatactggttggaacgacatcatgggcggtggctttgcttggcgtcgaccacaaatgtattataaaaacacgcccgtgaatgccccgttcatcattctttcttgttggctatataatgaacttaatgaaacgaaatatttagagtgggcaatgaagacctatgaatggcaaactaaagtacttgtacgtgaagatggttttgttgaagatggcattaatcgtttagaagacgggaccattgattatgaatggaaatttacttataaccaaggtgtgtatatcggagctaatttagaattataccggatcactaaagaagcaaaatatttagacacagcgaataaaactgcggctatatcattaaaagaattaacagaagatggtatatttaaagatgaaggaaatgggggagacgaagggcttttcaaaggaatcttttacagatattttacagatttaatagaagaaacggcgaataaaacttaccgagattttgtactaaatagttgtcaaatactcgttgaaaacgcaaaattagatggatatttgttaatgggaatgaactggaaagaaaaaccttctgggaaaattccttattcagcagaattaagcggaatgatcgcacttgaaatggctgcaaaattagaataataaaaaaagcacttcctacttggaggtgctttttagtggctcgactgaatctccttctacaagcagtggaggtaaagtttctttatttatcgtatctggtttaagcacttgatttaacagcatatcaactgctttaacgccgatttcatactgtgcttgttttatatgtgtaaattggaatgcggaggtatcaaaaaaattatccggatgatcaaaacaaaccacagataaattagtaggaatagatttgcctaacttattacatgcttgttttatcaaaagggcgatattatattctgtcgctacaagggcagtaatttccgggtgtgtttctaaaaaacgagcaattttatcaatatctgtttgaatcgaaaccgttgaatttggcattactgattcaatttcacgaaaaacataatcagaatgaaaagcggtatggaaagatgcatgtccacgaataaaaccattcactcgactatcaagcgtagaaactggactagtagacgttatcattccaatgtgcttatggccaagttcaaataatttctctgtaataatacgaccagcttctgtattatcagaactaatagaggatattggtaaaccttctaacgtacgatctatcacaactaaagggaatttttgagaagcaagctccagtaaggttggtgaaacaaatttagaactagcaggtaaaataagtatcccagcaacattcatttcaataaactcttgcagtatttcttcttctcgctcagtatctcccagtgatttttttacaataatatgagctttagagtcactgtgctctagcatgccagataataaaattgttccaaaagtgtcgtcgaaatttgtcataatacaaccaaaaagtggtttatcgaacttcctcgtttcgatttgctcactatttggcgagtcattaataacaaaagtaccgacacgagggcgccttgaaatataaccatctttttttaataattccagcgctttttttaacgtaatactgctcacatcaaattgagccattaattcattttcggtcggcattttgctaccaacaggaatcttgccttcttgaatggataatttaagctgatcataaactttttgatatagtagtgttttcatttactcacccattaaatatattttataatattaattatatttaattttaagcataatgtaaactaattacgataaaaaagtgaaaatctctgtacaaactttaataaatggatgactcatgttaaacttaaatttaggaaaaaaaggaaaaggtgtagaaatggctataaaaaaattaaacgatttttattttaaaaaacttagtagctggaatttaatacatagctttatgaaaggtttttggagagcgttttttttattagtgctgcttttaattgttggtaatgttatagtcatgaatttagtggataatcgtttttttattccagtaattttggttagtttactctgtattccacttttttattacctattgatttataatcgggcgaaaaaatttattaaaacccgttatcagttgcgtaattttaaagagttagcagttatgcgtcgctatttattatttgcttatttagaaaaaagtggtttcagttcaagagacgacttagaaaaactgcttcggtttattcactctgaaatggcggaagagaaaaagaactataagccacttagcacgatgataggcgtttttatagctgcatttttagctatattaggcgggtcttttctatttttaatgaataatgtagcggaacgactcattgcggcagtgatcattatcgttatggcaatagtattgtattttttcgggattacgattatgtcagttattcgttctaaatcagaaataaatgcaaaaaaagagcacgaactaacaaaagaaataattgctattcaaacagctatgttagtcacagaaaatacgagttaccatccctttttggcgatggagaaaaaagtgaatgaaaacgattttttgaaagagattattacatcacggtcctttttataacataattttttaggcatacttaggaggaaaagtaatgacaaccaaacgcaaagagactagagaaagtgtttgttatcgggaaattaaaaagaagattagaaacggggaactaaagccaggtgatcgcttaatagaaaacacgttatcagagcagcttggtattagtcggacgcccattcgtaaagcaatcgggatgcttgctgcagatggatatgtggaatataatgatttccgcggcgcttttgttcgggacagtattattaataaagaacgttattttgaaatgactgaaattcttggtttatttttaaaacaagccattcaaaaaattcgtactaaaaaaatcagttttaataagatgcgcgtagtcgctaagttagtagaaattgaacgtgacgtagaaccaagtgatccagcagtttattttgaatatgagaaatggtttgttaatgatttattaacctatatgaaaaataattactacttaaaaattagcaatgacttttttaataatattcaagagtttggtgatgaagaagtaattaaaatcgctcaaaacgcttgtgttaaaacaatcgctaatattcagcgttttatcgatgcgcttgaagcacaaaattacgacgaatgtatggcgatcattgatcaagtcattgatgcgcatgtattagtcgcttatcggtaaaaaagcattgtccccattcaaaagggacaatgctttttttattttatttttactaaatatcttccggttattccgccattcatgatttggtgaagggcagctggtaattcagaaaaattgatttcagtagcaagctcatttaaattagttaatttaaaatctgttgcaagtcgtttccagatgcgttctcgttttggcattggacaaagaacggaatcaataccaaaaagttgaatcccacgcaagataaaagggaaaacagttgtatctaattttccacccgctgacataccacatgtcgttactgccccaccgtattttacagcagttagtaagtatgaaagtggttttccgccaacacaatcaatcgctcctgcatatagttgtttatctagagcgcggattttttctggttggaatgcttcgcggggaacgacttctttcgcgcctagtttatgtaaaaatgtttctgcgtctttttttcctgaagaagctacgactgaatatcctcttttagctaagatggctgtgctaaggctaccaacgccgccagtagcgccactcacagcgatttttccagcatctggtgttacgccgctaaattccagcgcatcgaccgagagcgctgctgtgaagcctgctgttccaaggatcatagcttctttaagcgataaaccttttggtaaagcgaccacccattcagcgggaacccggataatttcgctatagccaccagaatagctaacaccaaaatcatagcttgttacgataacttcatcaccggccttaaaacgagctgattttgattcaacaacgacaccacttgcatcaattcccggaataaaaggatattccttcacaatttttccatcaggaagtactgccagcccatctttgtaattaataccagaatagtgaacctcaattgttacttcattttctggtaagttatctaaagtagtttctctaaaatgaagtgaagtattgtctgcctctttttcaatgaaaagcgcttgaaatgatttcatttataaattcctccacaactctattttgtgttcatcttcactttacgacttttttcggcatttttcaaggctgtgactggtacaaatccccatttcaaggtaaactatagtagtgaagatgcctatattatgtgtgaaaatataaatagaatttttttgcaagagagggtgagtgcgatggggaaggcactattgattgtgaatccatcatcaggtaaagaaaaaggaaaaacttatcaagggaaaacagaagaagtcttaaaaaaacgatatgatgaagtagaagtacgtttaacagaaaaagcaggagatgcaacggaatttgcgtcttgggcatcggaacaagggtttgacgcagttatcgcaatgggcggtgatggaacgctaaatgaaactataaatggtttagcaatccatgaaaaacgaccagatttcggctttattccgcttgggaccgtcaatgatttggcgcgttcagtaggtataccgctaaaaccagaaaaagcgattcaagcgcttgaaaaagcaaaagcaattccaatggacatcggccgaattggcgatcaatattttatgaacgtattagcgattggaatgattgcgcaagctgttgaccaagtgagcgtagaacaaaaaacgaaatttggttcagtagcatactttttagaaggtctaaaagcgtttaaccgcaatgaactacttcattttaaactagaatatgacgaggaagtatgggaaggtgaggcagcacttgttgtggctggcttaacgaaatcagtcggcggaatggaatcatgggctcctgatgccaaaatcgatgacggttatcttcatgtcgtcgtgttaactaaactcgggctacttgatgcggctaatatgattccgcaattaattcgtggtaatttaaaaaatagcgatggcgttgtttatattaaaacgaagaaattaacgattgatgcaagcggggacgacttaagcattaatgtggacggcgatccaggtccaggcgttccagccgagattgaagtccttggaagccatttgaacatcctcgcacctaaaaaaagcagccagaagcgcttcggtccattcatactgaaaaagtaacagctagcgttgttattataaatgtagaagaataaggagatgagaagctttatggaagaggaattagaagtcattcataaaggtcttgccaatgcgaaaaatggttttaaagcggtccctgggaagctttatttgaccgaaacttacattgtacacaagccaaatgattactttgacgaagaaatcaatattccactgaaccgcgtctctaaaattcgcggagtccgaacaaaaattcttggaaaagagttattatccaacattttagaagtagatatgatttcaggtgtgaagtatcaatttgttgtaaataaacaaaagaaatggcttgaagcggtcagaaaagtactagaaagccgcggtgaaccagaaaaattaggataaaaagaagctggcgcaacaaagtgtccagcttctttttttatgctaaatgaaaggcagttgcaccaattaagttggcatcatttccaaactgacaactaactacagttgggcgaattgtagcaatcggaacactcgcctttacttgatcgacgtagctatttagttcagttataaaatcagggcgttcactcacaccgccaccgatcacaaccatctcaggatcaagtgcatactgtaaattaaaaatacttcgagctaaataataaaacattgtctcaagttcttctttggcgacctcatttccttctgaacgaagcttaaaaacaagatgaccatcaacttcatcagcaggaagttcaaggcgttctgaaatccgagtagcagcatttacgacagtaccaagctcgctaagtgtgtgtccatcacggtccatcaacatataaccaaattcgccgccatgtaaattcgcgccatgatgtactttaccaccacgaataaccgcgccacctacgccacttccaagtatcataaaaataatatcttgtttatctttagctgctccaatccaaacttctgctaaagccgcacagttggcgtcattttccattgtaaccggaagtccgagtttttcttcaagtaattgtttgaaaggaaagttatgtatgtaaggaattgcgctcgctccgccaatgatgccggtttcattatttactgcaccaggacaactaaacgcggcaccttggaaagaatagtcataattagatttcacatccaccaataattgtatcatttcatccaaattatcgggagttgtaaatttacctttttctagtattgcgccttctgttgttaagacgccatacttcactgcggtaccacccatatcaaatgctagtatcgtcataatccgatctcctttttataaaaagtatatacttatcatacttttaaataagacaaatgacaaataaaaagtgaaattactttgctaaaaattaccgtcactttcgagttttgtgctataataaagcaagaatttgaagcgcaggaggaaatggttagtggagataaaggttcaaaaaaaattgactgacggcagaatcgcttttagtagtgaatatggtgaatgcgttggtatatgggccgatgaagacccagaaccaagtagggtttacacggtagaaattacgatacctgatatgattaccgcggaacttttgcatgaaagtgaagaaaaacattgtttattagaaatagatgaagatggcttagttcatgtagttgggaagttggaggactacgaggaagatggctttgcggtactccgtctagaagaaagtattatttgttttgatacgaaattcagcgaagaaatcgaaatgctccatggaagatttgttgaatttgtcattccggaaatagaattaagtaatgttggtatataaattaattggttttaaaagtctataaaaatatagtcaatagaaaaagagacctgcatgagctagatttaaagcttctcagtgtctcttttattttcttcatatcctataatgaactaaatagttataattgattaaagtattagtttgggtagggaggaattggttaatttagataaatttaactagttcgtctagaactgaatcgtatttcacttgactaggcattgttccatcttcaccagctgtattttttaaaagtttaatattacctgtacctaatgaataatctaagtttacaagtgatgtgagattatccttgtaaagaactaatttcatagactctacagattttacatctaacaatacagctaggtttagccaataaaggttatcaacagagatacaatggttctttttatctcggatgctaacttcactatagctgctctcatcatctgttgatttatttctaaacttaatactagtaatatcgcctaaaggattccgaactatattcatggctataatggtttgaatagatgttttaacatagtcagctgtagaaatattctcacttttatttttatattttgcatctattgatttacagaaaacattaataggctctttaaaagaatctagttctttattaactttatttcttacctcttttagtaaattttcttcaatattaaatagtttttctttaaaattacttacatgtttatattttataggattcttaaaagaatcaataaaagtaagagtattttttatgcgcccagatgcagttctaaatttgtcttctgtattaataatattattaatctcttgtgtacgaatatgcaacagttgtcttctgaaatcatattctactaaagttggaaaaataaaattataagtttcatcctcttctttatcatatctttgaagtatttgactatcaattaataatagtctcaatgattccacggtaccaggagttccttcaactagtttatacccacataccttaaaatccttctttgtagatattcctatattttcaagtatttcaatggtatttggaagtttccaattgattaatctttccccgttagtttttaattgctcacttgataacttataaatgtaagaattaaacaaagaatcttcagtaataataaatagtatttcgtcaatttgctcaatagttaaaatttcattttttaccatggcagctagactttttgaagcataatcataggatttattgtttttttctctaaactttcgattatactctttaagtgtatttttcaatgaatactcttcttctttttttgtgcttatttgtttaaatgcatcttggatttttccgattttgataaatgggctaaacaaaacaatatttttgtagattctttcatcatattctatcatgtgttttcatctccttgttgttataattcctccctatttttagtatacacaattaaataaaataaatctttttcgaaagtgcttttctcttttttagttgttcttataattatatcaacaggaaattataagttttattatgaaactgtatcaaatacaatatttataattaagagataataaatatttttttatgaataaattgttagcaaaaacgccatgcttcatttccctaaaaacagggaagtaagcgtggcgttttttagctatatgtagtaaatacagcgagcattttttctaaatctttttcagatcttgcaaagagcatcaaacgttggcgattagtttcaatgactaacacaccgtcttccgataaattcattcgttcgattttagcgtatgggaagaatagaagggcataataaagtcctgtttctttaaaaacagcttttgaactacggaagaaacaaatatagatgaataatacacccataacagcaagtaataccgaagttgagaacggaccttcacgaaagaatgtattggaaacaaataaaagaacaatgattccaacgaaaatatagccatcccaacgtccacgagaacgcaatttgacacttaagactgttttaccttttgaaagaggaattactgcatcattatacaagatatacagtaacgtcaatatgttggcaatgaataaaaagatattagtagcatcccaaaccatttagttatcactcacaatctatcattggtatagtttagtaatattgtaacataattaagtaaataaaagggagaaccggatctaattccggttctccgctttttcattttagttcattatcctagcggtgaatacccagctggtggaagtcctaaaataccagaccagtaacctagaataccaacaacgaatagccccaaaattagccataaagcattgacttttttcttcagaatccacatacaagcgaatgttagcagaagggcaagaagacctggcattaattggtccaagatactttggacagtagttggaacgtctttaccagttttagaatcttctgttgtataagctacaagtggaacatagattgttgtccacttattaacgagggcacccataacgaatagtccgagaatggaagctccttctgttagtttttgaagcagaccgccagacatatcagatacaacatctgtaccttttgtatatccgtagaatacgccccaataacggaaacctagacgaattgcattaaatagtacgaagaataaaattggcccgatgatactaccgtcagttgcaaaacctgcacctaaagcggcaagtaccggacgaacagttccccagaaaattggatccccaacaccggcaagtggtcccattaaaccaactttaataccattgatagcaccgtcgtcaatatcagcaccattggctttttgttcttccatcgcagtagttacacctaagataggtgcggccatatatggatgggtattaaagaactcaaggtgacgtttgatagcttgttccctatcaggtcctttttcaggataaagacgtttaattactggaattactgagaaacagaaacctagagattgcatacgttcaaagttccacgacccttggaagaggttggaacgaatgaaaacgcccattaaatcacttttcgttattttcttttcattaactgtaatttgttcactcatattttttctcccccttccttagtcgtcaaggtcgtcgtcgagatcatcatccgctgatcgtccgccgccgcccccaccgtattgttggatagcttctttcaattgatatttaggatttagttggatatatacgattgctgcaactagccctagaacacctagtgctaccaagttaaaggcagtaaatgctgctacaacaaaacctaagaagaagaaaggcattaaatatttagctgacatcatgttaataaccattgcgtaaccaacaacaacgataaatccaccagctacgttaagaccattaacaataacatcaggaatggcattgagtaaattttctacggcgctagtaccaactgttaccgcaacgataacggctggaattgcgatacgcattgcttgaagtagtagtgcagtaacatgtatccagtcgagacttcgcagattaccttccttaccagctttatcagccatgtgttggaaagcaactgtaattgtacgaactagaattgtaagtacttgaccaagagcagctaaaggaatcgcaagcgaaatacctacgctaatatcttgtccccctgtaataactaagatagtagaaataatagatgcaagtgcagcatcaggtgcaacagcagctccgatgttcatccagccaagcgcgatcatttcaagtgttcccccaataatgataccggttgtaatatcccctaaaacaagaccgattaatgtacaggcaattaatggacggtgcgtttgccactcatccaaaatactacccataccactaatacatgatacgaggaatacaaggattaattgtattgctgacatatatttccctcccaatttttctttaaaatgataaaaaagataatttcaatatgatgactgaataatgaaagcgtctgttacatgagcttttattcatgaatcacccctttaaaggtcttcctttaaacatttgcatatctttctactttaaaaatgaaagcctacttttctttatcaagtagtggaatgagttttactttattatcagaagcgactttacggatttctagttcgattcctttttcgtctaatttgcggaatgctgcttcgtctgttgcatcgacggaaactgcattggtaatcatgtgtttaccttcgcggaatgccatgccaccgatattaacggttgtgatattgataccagcttctactaaagttaatacatctgttgggttagtaaataaaagcattactggagtttttgcgtatttaggattattgtatacacgaattcctttttgtacgtcaacaacactagctttaactcctggaggtgctacttgtgtaagaagggttttacgcacttcatcctttgctacatcatcacttataacaataatacgttctacctgtgtttcttttgtccaaactgttgctacttgaccgtgaattaagcgatcatcaatacgtgctaagcgaatttccattataaatcgtcctccccgacttcggtttctttttttggtaatgattctttcagtgacttaacgccatcacttcctgctgttaaggcagtttttactagatctttttgattacttgcagcacgcatggagagtgtttcaagtaacattgggatattgacgcccgttataacgtccatattctcttctggaagggcaatttggctagaagcattataaggactaccaccaaataagtcgaccataaaaataacaccttctgaagtatctaatttgtctagtttttctttatatttggtaataagcgtatcagtgttttctccaggaacaaacgtaataaattcaacattgtcctgtttgccgataatcatttctgctgatttgagcaattcacgcgcagcttcaccatgtgtgccaataataattgcaactggcataagtatctcctccttaaagcgtggatatgaagcatccattaatactaacgcaaaaactgtgccaacttttctgtattaaactaccccctttattaatagaagtggttcaaggcttctgtaagcgtgtactaaaaggtgaataggagcttaatacgctatataactacattaatacactaaatatttatcttagacatacatacaacattaccctaaaaaatgtagcagaaaacgcaatagttgaaaataaaaaaagccaacgtaacaattttgttggctttctgatgtttatgaaagtacttctggttgaatttcgttcaaaatatcatacaaataacaaagttcatcatttgtaagctttaagttcattttgtagatgacttctttatttgtttgttctaatgcactgaaaatatctgtgtctagcatggtttttggttcgcggtagactaaaccatcatttaaaaccattcgttctagagcgcatcctacatggatgagtaaattaattttaaaagtattatccagtttgtaacctagttttttctctaatacagttgcaaaagagctcagaatttcgattgttttctttggattaagataggttagaaattcattaaggctttcttcgataatttcttttgcgattcgaccagtttcgccttttttaacaataatgttgcgttgtttaactaggctaactaattgttcttcaccgtcaatgccaaaaagtcgttcaagcgggatgaaggggatttggatttttggatcttgaattccgacagccattaaaatatcgttttcttcttgtagctgttctaatcttgtatccatttcatgtaaaccgattgggatgactttgatggcgtcggttgtgatagtatctaaaatattttcaataaatagttgaagtttttcagcagttccttcgccagtcgcacaaatagtaacgatagcgtgtggtttttgattggaatcgagtgtgtcatcatcagaattataacccccgtagccacggaaatctttcagtgaatcgtaaatactatctagctccatatcaagaatgtttgatttacgtacggcttcgataactgtcgcggttgaaaccatatcaattgagcgaaccggaatgcccgtacgttcagaaataactggagcaaaacttgtgagtgagcccatatcaacaagtagaagtagaccacgtcccatatccatttctttcgctcgttcagtcagcttatccagcacgattttcggactttggtcaagcggcatatcaattccttcgaccaatccttcgccgagtaattttttcgcaacgctaaccatactactagcggtattatttccatgagtagcaacaagtacagcaacgcgcgcattttcttgttctttaagcaaggagctaatgagaagggttagatacattacttccatatttggaacgcgaatgtggaaagtagcttcaatatcatctttaatttcacgagataattcgtacgcttcaggttggtcattaactacattttcgatattcgtgtattttaacggtttgttactttcaatgcgtttaataaaggaagtcaagtgcagactaaaggcgagtaagaagcgctcatttaactttttgcctagctgatgctcgattctttgttcaataccttctgcaaaattaaggatttcttcattcacgatttttaaaatattttcgcgattgtggatggtgtttttgaatttgttatagaaattgttgaggtgaatatcaatatccatcttgataaatttcttaatatcgtcatcttctacaccttgatccattaaaatagaagctttatcttcaataattttataaagattgaagtttggctcatattcgtcggaagtaattaacgtgttgtttagctcggggaaaatggtcgtgtaaggctctagatattccgcgatggcttgaagttctttgcgccgattactaaagtggaaaaagccatctttaatatttatcggtaaagttttaaaatcgattaaaatttcatcgtctttatcaaaactgtttaaaaaaccttgcgcacaaacgagttgaatgtttgatttcaactggccgatattgccgtaagtagtattaccaatcagcgctttggcagcctcatcttcaatccgaatcggtttatttacacggtgcgcctcgctagaaagtaagtatttaagcagttccactcgttcaaaagcagttctttcttctaagcttggtaaagtaataataatcggaatacgacgcataaatgtttttaataaggaagattccggattttctgtcgttgctccaataattaaaacattggattttcgagttcggtcagtttcgccgagtttgttgtaggtaccagagtccatcagataaaaaatcatttcttgcccttcaggagggagacgatgaatttcatcgaggaataaaatacctccttctgctttttcaacgagtccgcctttatcattttccgcaccagtaaaggcacctttgacatgaccaaaaatatgggacatcaagagttgcgggttattgtagtaatcggcacagttgaaaataataaacggggcatcagccggcaatcgtttggcatgttgcgagaaacgatacattaagttagcgaacaatgttttacccacaccagtttgtccaagaatcattgtatgtaagccgtttggtggataaagtactgctgctttggcttgttcgacaggggttttaagactatcatttacgccaattaaatcatcgaaagggcttctctcaacgatacttggctttaaaattttcagaagtgcttcacaactttcaaattctagttcgttatctgaaagcacgcgcccaatttcttcttccaccgttcgtttcggaaaataaagcactggtcgcccaacgattttaataattttgccttgtctatggagttcatttaattccatgctgacgttatttcttaaaatatctaatgtttctgaaatagtagttgcagtaaagccttcattattttctagttgctcacgaatcgacttagttgaagggttttctaaaataaattcataaatacggtcaatacgcttcaattataaaacctccaattagtgtattgaaaaacggagtgtgtattgaatgatgctaatacactctagaattctgtatttatcttagcattcctagtgaaaatgtcaatgattatttgcttaaaatcaaattgactccccgcgcggatagtactattatatagaaggaacaaataaaatcaatgaggtgttttcataatgtcaaaagtactatttattaaagcgtcaccacttccaaatgaagtatccagaagttcgcaagtagcagctacattcatcgacgaatacaaagcgaaaaatccgtctgatacagtagaagaattagttttatataatacagaagttccgttattagatttagaattaatgacagctggccgcgaattacaagctggtaaagcatttactgatttagctccagatgtacaaaaaagattaaatgcctacaatgcgcttactgagcaattcttagcagcagacaaatatgtattcgttttcccactttggaaccttggaatcccgccacttttaaaagcttatgtagacacttttgttattgctggaaaatcattccgctatacagaacacggcccagaagcacttttaaaaggtaaaaaagcgattttgattcatggtagcggtggtatttattctgctggaccaacaagttcatttactcacggagaaccttatttgcgcacaattttacaatttatcggtattgatgtagtaccatcgatttttgttgaaggtattgaccacaatccaagcaaagaagcggaaatcgttgcagctgctaaagcggtagcgcatgaaagtgctgctgaattctaaaaaagtttgtgaaaaatagtttttaatattaaatgttaatatagtattatcaactgtctagaccaataaaaacatataaaaagattgctaatccctttataaattggtaaagtagagaagtagattgatggataaagtgctgactcaactcggcactttattctgtttagttactcgaaagggatgaatagagatggaagagcaaaaagaagaattgcaaagaggactgaaaaatagacatattcagttgattgcgattggcggagcaattggtacagggctttttctaggagcagggaagtcaattcatttagccggaccttctatcatgttagtttacttaattattggggctattttattctttgttatgagagctttgggagaattattaatacataatccaacaacaggatcttttaccgaatttgcggaacaatttatcggaccgtgggctggctttattactggttggacttactggttttgctggattgtaaccggaattgcagaaatcacagcagttggaatgtacgtgaagttttgggtacctgatttacctcagtggattccagcactaggttgtgttttaattttactattatttaacttagctacagtcaaagcttttggcgaaattgagttttggtttgcgattattaaagtggttgttattatcgctttaatcgtaatcggatttgtacttgtatttattggttataaacatggaactagtacagcatcattttctaatttaattgattatggtggctttttcccaaatggagtagctggatttttacttgcgttccaaatggcgaccttctcgtttgttgggattgaacttgttggggtgacagcaggagaagcagatgatccagagcggacacttccaaaagcaatcaataatattcctatccggattttgattttctatattggtgctttattagtactaatgtccatttatccgtggagtaatattgatcccgacacaagtccattcgttagtgtatttacgatgattgggattccggccgcggcaggaattattaatttcgttgtattaacagccgcgatgtcttcttgtaatagtggtatttttagtactagtcggatgctttatacactttcagcagaaggaaaagcaccgaagaaaatgcaccacttaagttcaaatggagtgccagcaaccgcgttaatcacttctacagcatgcttacttatcggtgtatttttaaactatattctaccagagcaagtatttattttagttacaagtatcgcaacgatttgctttatctgggtttggggcattattttagtggcacatttacgtttccgtcataaacatccggaaatctctgccaaaagtaaatttaaaatgccattatcgccatttatgaactgggtgagtttgattttctttgcaggattattgattattctaggatttgcagctgatacacgtatcgctttatttgtaactccagtatggttcttaattctagctatagcttatcaaattttaaaagcatcaaaccgaaagacaaaaattagacataattaacgagaatacagtcattcgctaaagaaagcagttttagcgggtgactgcttttttttgaagccaaaatagctccgcgaaattctttacaaatcaaaaaaatcgtgtagaatgataggtgtttagaggttttgatgcctttacgcatttcgagtgagtactcactcatttttataaatgcgtacatatgtgaagcagtatacaattaacgaatgatatgtgaatttctgtacatatcaagtagggcgtaacgaaagggatgagaaaatgattcatgcaggtttagatgtgggatcaacaacagcaaaagccgtagcacttaacgaccagggggatattttatttcaaacgtaccgaagacatttttccgacattaaaaaagtaacactagaaatcatgcaagatatgcaaaaaaaatgtggcatgaccgaaatgacatttaaaattacagggtcttcagggcttgccatctccaaatttttgaatgtaccatttgtgcaggaagtaattgcttgtacagaagcagtagaacaggtcattccagagacagatgtagtcattgagctcggcggggaagatgcgaagattatttatttcagcggtgggattgagcagcgaatgaataacgcgtgtgcggggggaactggtgcttttattgaccaaatcgccacactacttcaaaccgatccaactggtttaaatgaactagcgcaaaatgcgaatacgatttatccaatcgcttctagatgcggtgttttcgcaaaaacagacgtgcaaccattacttaatgaaggtgctagaaaagaagatatagcagcatctatttttcaaagtgtcgttacacaaaccattagtgggctagcttgtggacgcccaatccgcgggaaagtagcttttcttggaggtccgctaacgtttcttgatcaattacgttatcgttttacagaaacgcttaaaatgaaagacagtgatattatcgcacctcaaaatgcggaatattttattgcgcttggaactgcttttacagggctaaacgatgtaccgataaaagtggcagatatgattaatcgtctgtctaacatggatatgacaacaatggcgaccgatacggttattttgccagcactttttgaaaataacgaagacttagaagattttcgggcacgtcataatcaaatgaaagctaaacgggcgaagttggaagagtatgaaggcgacgcttatttaggaattgatgccggttcaacgacaacgaaattaattttaatgagccaaaccaacgaaattttatactcattttattcaagcaataacggtaatccacttcaatctgttattgatgcaacaagcgatttatatgaaatcttaccagaaaaagttcgaatagcgcagtctggaattacaggttacggcgagtcgcttattaaagccgcacttaaaattgatgttggcgaaatagaaaccgtagcgcattatcgtgctgctcgtgagtttttgccggatgttgattttattttagacattggcggacaagatatgaaatgtatgaaaattaaaaaaggggcactggatagcttaatgctcaatgaagcttgttcagccggatgtggttcgttccttgaaacttttgcgcaaacacttaatttatccattgaagaattcgctgccagagccttggaagcaaaagctccagttgacttaggttcgcgctgtacggtgttcatgaattccaaagtgaaacaagtgcaaaaagaaggcgttagtatggaagatttatccgcgggtctcgcatattccgtcgtaaaaaatgcccttcaaaaagtaattaaactccgtagcccgaaagatattggtgaaaaagttatcgtacaaggcggaactttttacaatgaatccgtattacgtgcttttgagcttttaacagggcgggaagttgttcgaccggatattgcgggaatgatgggggcttatggtgctgctttaatcgccagggaacattatgaaactggcgaagtaaccgagatgctcgtactggaaaaattacgtgaatttagtgcagatacgtcgcaatcgcgttgtaacctttgtagtaacacatgccagttaaccgtgacaagatttggcgatgaccggatgtttgttagtggaaaccgttgtgaacgcggggaacgtgtcgaaacaaaacgcaacttactaccaaacttatatgcgtataaattaaaacgtacctttgattacaaatcactgaaaaaatccgaagctacaaggggcaccattggcataccgcgtgcgctgaatgtttttgaaaactatccgctgtggcatacgattttaacaaacttaggtttccgtgtcgttttatcttctaaatcgtctaaaaacctgtatgacaaaggtatcgaaacgattgcttctgaagcggtttgtttcccagccaaattaacacatggtcatattatggatttaattaagaaaaaagcggatcgcattttctatccatctgttgtttatgaaaaaccagaatttggcgaggcgacaaataactttaactgtccagtggtggccggttatcctgaagttattcgtgtgaatgtggatgctttggaagaaaaaaacatcccgatgattagtccatttttaacgttagataatgaaaaagcattaatcgaacaaatgagtctcgcattcccagaaattccagctgctgatatggaaaaagcagtccaagctggattagaggaagcagaactttgccgtaaagatattcaagctgaaggagaagcggcacttacttatattaagaaaaataaaattaaaggaattgttcttgctgggcacccgtatcacattgatccagaagtgaaccacggcattcctgaacttattacgatgaatggcatggcggttcttaccgaagattcaatttctcatcttggtgaaattgaccataaactccgcgtcgaaaatcagtggaaatatcacgcaagactatatcgcgcagctagctttactgctaaaagtgaagatttagaatttgtgcaattgacgtcatttggttgcggacttgatgcaattacgacggatatgtgccaagaaatcattgaaggtcataataaagtatatacactacttaaaatcgatgaaatcaacaaccttggtgccgctcgtattcgcgtacgttcgttaaaagcagcaatggaagaacgtgagaaaaacaatgtgaaaccaggaattatggcaaaaccaaaagaacgaccattatttacaaaggaaatgaagaaaacctatactattttagcgccacagctagctccgacccattttgaaatgttagaagcagcttgtaaagtgggcggttataacttggaagtgttaccagcagttacgcctcgcgcggttgatgaggggttacgttacgtaaataatgatgcatgttatccggcgattttaactatcggacaaatgatggatgcgctgaaacatggtgattatgatgtgaataatttagcggtattgatgacgcaaacgggcggaggatgccgggcaaccaactatatctcgatgttgaaaaaagcacttggagaagctggccttgaccatatcccagttatttcgcttaatgctaatggtttagaaaaacaaccaggttttaaaatgacgccaaaagttctcattcgtttcttggctggaattagtttaggtgatgccctcgaccgaatgctataccgaaccagaccatatgaagtcgaaccaggcagtgcgaataaactattccgtaaataccttgatgccggacgtgctctaatggaaaattattccttcgtagcatataaaaaattagcaaacgaaatggttcgcgcttttgacaacctaccaattacaaatgaagtgaaaccaagagttggcgtggttggagaaattctcgtgaaattccatcccggggctaataataatattgtcgatgtcattgaagacgagggcggagaagcggttgttccagacttaacagatttcattttatattgttgttatgacgatcattttgcagcgaatactttcggacgttccaaagtaaaatcattcgcaaaacaaagcgttgcgattccgctcattaatcaattccgcaaaccagtgacagatgcgctgaagaaaagtgaacgctttgaagcaccagcaagcatcgaatctatcgctgaaaaagcgagtcaattactatctctcggaaataaaatgggtgaaggctggttcttaacaggagaaatgtttgaattactcgatagtaacgtaccaaatatcgcgtgcttacaaccatttgcttgtttgccaaaccatattaccggtcgagggatgattaaaggactcaaaaaaatgtatccagaagctaacatcatgtcgattgactacgatgccggatcaagttctgtgaatcaactaaatcgaatcaaactaatgctctccatcgccagaaaacaactagaaacgacagaagttatcaccgaaaaagaaaccaatacacgatttaacccaagagaaaaaatccttggtaaagcaaaacaagtaagagaaagcgccccagtcgaaatgattggaaacaaagtgaaacaagcgcgcgatgcagatccagttggcgcgatagctcagaaagtaaagcacgtagcttctagcaatgagcatgtccaaaccgataatgattaattaaaaagccgcccatccaacgggcggcttttttctattcaatagttaaattcttcttttcacagtaatatcctttaccacccacaaacactttttctatctcatcattattactcaatgctaaattaactaagacttcagaaggcgagtccaaagaatagccctgttcaaacagataattctcttttcgcaagtaatgatttttataaagataacatgctaaagcagcattcgaagtccctgttgctgcttcttcattaatgtcgtatagcggggcgaaattccgacaaataattcggtcgttattaaaagtataaagatgcattccaacgacatcataagtcgcactaacttcccggatcttttcaaaatttggctctaaggcatgtaaatctatttcacttttgattggaattaatatatcttttaaaccagttgagacaatttgaacttgatagtgtgtattaaccttgtttaagtcaaagcattcagttagctcatttggcgggattatatcatagaaatttgggcgattttgctccatgaagatagtaccgtcttttaatgtaatagtaagaacaccgctatttgtttcgattgtatattgattcttatgaagtttatttaaatgcatcaatatcgcaaaagaaccaatagtcgcatgcccgcataaatcaacttcttcttttggtgtaaaatattctaatttataatcggcaattttagaatcggttacaaaagctgtttccgcatagcctagttgttttgcaatcgccattttttgttgggtagttaatgttggttcatttaatactacgccagctttatttccgccgttgttatttttgctaaatgcgcttgcaacgtatacggatatgttcataaaacatcattctccttcgttaaacttaatcttcggtaatcattgcaaactccgcacgcactactttttttaagtcaaaaggggctagttcgatttgaagtcctctttttccggctgaaattaagatagtatccagctgttctgcactattatcaataaaagttggaaatagtttcttcataccaataggagaacaaccaccgcgaatataacctgttagcttttccaacgtatcaactggaattaattcacattttttattcctgctaatcttcgctaagtgttttaaatgcaaggttttatcagctggaatgcacgcgacgatatttcctgttttatcgccagtaagaacgagcgttttaaaaatttgcgcaggattattccccgtttcttctgcaacatgaagtgcatcaagcgcgtcttcactccattcatactcacgtaattggtaactaatcttctgtttatccaaaattcgacacgcatttgtttttttattcaattgtttcacctcaattaattttaatttatgtacaaattatgacacttttagttaaatagttggcttttatcgctgctttctgtacaatgaaatggaattcaaataagaaagggagatttattaatgaaaaaagggttatttagcatggttcttgtgcttgcgatggtacttgttttaagtgcatgtggcggcgcatcaagggttgaaccaaaaaaagcaggagaaatcacagttaacgccgttgtttataataaagacacggataaagttaaagacgtatatggtgaagatggttctaaattcgaaaaagaatttgaaactagttttaaagaaagcttcattagtacattcactgcaagtttttcaagtgatgttaacttagacaaacaagtggatgatttctataatgcacttcgtaaacaagtaaacgaaaaaacatcgtacactactaaagtaacaaatgacgacaaagaaagtccagaaattcagttcgctgttaaaggcctagacatgaagggcgttcaaacagaattagtagaagaactaacaaaagcagcaactgctgatccatcaattgctacagatgatcaaaaaatggctgaaaaaacaatggaaatctacactaaagctgttcaaaatgcagatgcagtatcagaagcaaaaacaattacacttaaactaaaagcagatccagatgatgattcattatggaaaatgcaaaacgatatggcattcatgcaagaattaacaacagcattcttcatgggtggcatgaactaagatttttatagacactagcaactttcgggttgttggtgtttttttgtttttagcaatagatgttataattgcattaattagttgactaggagggggcacatggttacacttaaagtcgctttagtacaacaacaagcagtaccaaatgacaaagaggcaaatttaaatttatctataaagtatataaaagaagcgcaccgaaaaggagccgatttagtcctttttcccgaaatgtggtcaaacggctacgcgccaccttttgagacagcctttgatgagccaatggatgctggttttgaagaagagcgcacgcggtggttggcagatgcagtagcacgagatagcgcatacgttactactttaagaaaactcgcgaaagaactaaacattggcgtttgtgctacttatttatctaaaacaaaacaaaaaccgcaaaatacagctattataattgaccgaaatggagaaataattctagattacgctaaagtccatacgtgcgatttctctttagaagcattgctgcaaagcggggacgaatttaacgtttgtgagtttgatggcataaaacttggtgtgatgatatgttacgacagagaattcccggaaagcgccagagttttaatgttaaaaggggcagaaattatccttgttccaaatgcatgcgatatgaatccagctagactgaaccaactaaactctcgtgcttttgaaaatatggttggcgttgcaatggcaaactatcctggagagaaatggggcagatccactgctttttccccgattgtttttgatgaaaatgaggattaccgcgataatacgattattgaaacagacgacgtttcagaaggtatttttattgctgaatttaatttagacgagattcgaagttacagggaaaatgaaacgtggggaaatgcctaccgaaaaccgcaaacctatacagatttaataagtttagatgtaaaagaaccatttaaacgaaattaaaaaaacagagacgagcgattctctgttttttcttttaaaaataataaagccccgcaacaatcagcgcaacaaccaaaatccccggaaccagattcgcgacccgaattttcgttaaaccaagcaggttgagaccaatagccaaaatcataattccgccagtagccgttagttctttaataataagtgccatcaggtctgctggaatgaattgatcaatttgtgttgcaaaaagcgcgataaggccttcaaataaaaacaccggaatagccgagagcataacgccccaaccaagtgtcgtactaagaagaagggcgataaatccatccatcactgatttcgtataaagtacatcatgattaccacgaatgccactatcaagcgcgccaataattcccatcgcgccaatcacaaaaataagtgtagcagtaacaaagccttttgaaacattactttttccttttgcaccgactttccgttcaatccagtgcccgagttgattaagatggtaatctatattaagccattcaccaataacagctccaaaacaaatacttaaaataacaataagcgagttgctcgttttaaatgccatttgaataccaaggacgataacggataaacccatccctttcatgacagtatctttcatacgttcagggatattatgtaatttcatgccaattatagagccaattaaaatccctagcccattaactagcgcaccaagtagaaccattttcttcctcccttttttgcatatagcattagtatacaggaattttctggcaattgggagtattatttcggataaaaaagtcgaaggaagcgttttgctccttcgactttcgtgttattttccagccactgtaaatcgttcatttaagtggtttggtcgctcaatctcatctaaaacggcgatagcataatcttccatgctgataaaactattaccatcactaccaaataaaagatgatctttcccagattgatattcgccagtacgttcacctggctcaaacatggcagaagggctaatgtaagtccaactaaactctgccttatttgcttttaaatgttccaactgttttgcttgagcacgagcagttggatagtatggtgcttctctaagtccttttgattctaaaagggtgttaccatcttcatcaatttgaagacttgctgccccgccaacgacaattaggcgcggagatacagttccatttaaaacagaaatcagatgatcaagcgaatccacatgtttttctgcttcatctgggctgacaccataagcatcaacgacgacattttgatcagataaatctgaaagcgttaaatcaaaaatatctttttgtaaaatattaatatctttatgcgtttgcgttattttcccagcatttcttacaatagctgttacttcgtggccacgactttttgcttcttctaaaattcttgaaccagctcgacccgtagcgccaataataccaattttcatgaaaaaagccccctattcatttttatggaatagcttctcgcttgatagaagaattattcccgaaagaggggaccggaaaacatttttttatgattgttcttttgcagcggttgctaattgtttgatttttgctgcggaataaatgtgtgaaatcgtgaaaataataagcgccaaccaaatgaacatgaaggcaaataattggatgtggtcaaaactttctttgaaaagtaagacaccaagagcaagcattaacgtaggtccaatatattgcaagaagccgaccattgtatagctgattttcttcgcagctgtcgcaaataaaagtagtggaatagcggtaacaatcccagcgccaactaaaataatatttgtttgcgcggcatactgcattaatccattcgtcgcgaaaaagagtacataaatgagtgcgaatggcgtgataatcatcgtttcaagtgttaaaccagtccatacggaaacggaaacgacttttttaatcaacccataaagggagaaggaaacagccataccgattgctgcccaaggaacggacccaagatgccatgtgagaattaagacgccaattgttgccgagataactgcaataatctcaccgcgactcaatcgttcttttaaaatcaccgttgcgagaagtacatttacaagtggatttatatagtaaccaagacttgcttcggtcacatgcccgctattcactgtgtaaatgaataaataccagtttccagtaactaaaaaagctgccgcaataatggcgataagcgtttttggtttaagcaaaacgtcctttgtttcttgaaaaaccatcgaagtctttcgtaaacaaacaatcaaaaatagcataaaaataaaagaccatataattcgataggccaaaatctccataggagggacatttgtggctagcttccagtaaatcggaaggacaccccaaaatacatatgcgagagctccggcgataattccacctagctgcccattttgtttattttccatagcgatgttagcctccttttttaaaaacaatagaactattttatcctaaaagggagaataaagctacaaaaaaaaccacgaataggctagctactcgtagtttcagtaattatttacttgcttcaatttggatgtttaattttacttcgtcaccgataagtacgccaccagtttctaatgcagcattgtaatttaggccaaagtctttacggttgaatttaccttttgcttcaaagccagctaccatgttaccagtgtttggatcttttccagtaccttcatagcttacttcaagtgtaagaggtttagttacgtcgcgaatcgttaaatcaccagtcacttcgtattcatcatcgccgtctgctgtgatttttgttgctgtaaaagtaacgtttggatatttttctacattaaagaaatcttcactttttagatgcccatcgcgttgtgcttggcgagtatctacagaagctgctgatacagagaagtttaattttgctgttgttaaatcttctggatccatttcaatatctgctgtgaaatcgctaaatgcaccttttacttttgataccatcatgtgttttacttgaaattcgattgaactatgcgctgggtctacgttccatttttctactgtcattttttcattcctccaaatatgtttttttataaaagcattctcttataatctagcctaaattgtttgatattaaaccttagaaaaaatacttttacacgttagaaaagcaattgcttaactgtttataagtaaactatatcatacttacttttaataagcaactataaaaacgtattagaaatatatttttttcgtaaatatgattgagtttttctgataaagtgcgtagaataggtggtaagaggaggttgaatgatggaaaaaattaatacagatacagaaaatattagtgaattattaaaaacttattggtcaatacagcggatttcagcgggatatgccgatcaaaatgcggctagcttaggactaacaattcagcaacttgcgatgattaatgtgatttatagcacacctggcatttcagtggcggatttaacgaaacgattaataattactggaagttctgccgcagctaatgtggacgggttaattagcttaggccttgttgtaaaattaaacaaaacaatcccaactgataatatggatttaacactaaagctttcaaaaaaaggagaagacttatccaagcgctccactgcaaacgcttttatgtacaaagcgatgatgaaagtatttgaaaatttgaccgaagaagaaatagaagaattaatccgcttaaataaaaaagtagaaaccttactcaaaaagagtaaataaaaacatctcctgtatcattcaagtaaaaatgaatgaacaagagatgtttttttatttttgatcaaatttgcagtcttccagtggaatgacttttgttttatttgtaaatttaaatgataaccagaagataaggaaaatagggaggccgatataagaaataccgattttttgccaccaagcaggattcgtaaattcaggttttaaaaatgccgcgtaatcttgaccgacaataactaaaatacataagattaaagctaaaatcggaccaaaagggaaaaatttggctttatattttagttcgttcaaatcatggccttgcttaatgaaagctttacggaatcggtaatggctaatagcgatgccgacccaagcgataaatccggttaaaccagaggcagaaaggagccatgtataaatcactgtcccattttcggtaagcgtagtaatgaatgtcatcgcaccaacaatggttgtcacaataagtgcagccatcgggataccacgacggtttactttgcctaagaatttaggagcttttttatcacgagccattgcccaaagcattcttgtggaagcgtaaaggcctgaattaccagcggatagaacggaagtcaagataaccgcgttcattaccgaagccgcaaaagctagcccagccttttcaaatacgagcgtaaatggactaatcgccacatctgttgcctcagcgctcagtaaattcggattagtataaggaataatcatcccgataatgaaaatcgcaaaaatataaaataacaaaatccgccagaaaacttgcttaatcgctttaggaacacttttttctggagtagcgctttcaccagctgcaatcccaaccatttcagtaccttggaaagaaaatccagcaatcaagaacgtgcctaatatcgcgaaaaatccacctttaaatggtgcatctcctgctgtaaagttagaaaagccaatcacttcgccgccaagaataccaacaattgtcagcacaccgacgataagaaaaataataacagtcgctactttaataattgagaaccagtactctgactccccgtaagcttttaccgatagggcatttaacccgaaaatcaagagtaagaaaatcgcactccagagccaagcaggcgtattcggcaaccaaaattgaacaataatcgccgctgttgaaatatcgaccgcaagcgtgatcgcccagttaaaccaatagttccaaccgagtgcaaaaccaaaagctggatcaacaaatcgactagcatacgtactaaatgagccggaaacaggcatataggtagccatctcacctaagcttgtcattaaaaagtacaccataatgccaatcgcaatataagcaactagcgctccaccaggcccagcagtatgaatcgcatttccacttgctaaaaataatcctgttccgattgaaccaccaattgctatcatggatagatgccttgtctttaagtcacgacgaatctcgccatgtgtttcttttttcactataaatctccctttcttttatcagaggaagtgcgcaaaaaaacagccaatctgcaagaaattggctgttacgtattttaccaacatcattttgtcagatagcacacctataagaaatttcgacaaattcttatagcagtccagctcctttaggaaactgtcccaacaactatttcgatacaaagaaaaaatagtcacttcggcgattaacctgttcgttttttgtcattggcgtctttgtttcgcctcgaaaaaattactagtgcatctcgcaacctctacctcaccatttggatgagggtttatatttgattatttacccataataacggaaaatgggttgttttgcaatatgttttagtaaaattgtagtgcttctttgattgtgctataagtagttaaactagatagattttcttggtagcgcattaaagtcatcgcaaatttaggtgaaattccggtgataattagttccacacctgttagcttcataaagccatggaacttcacaagattcattacagcgtcttcattaaaatcagcaagaccagaaagatccataattaagtaatcttctttcccattatccatgtattcgctgacataatcggacatgtgctgaaaccggtcgtgggtcaaggaaccaattagcggcagcacacaaatattttccttaatgggaacaattggcgtggatagtttttcgatttcccataaggatttttcaagttccagttgataattatgctcggtcgtcacatctttttgaatgccgacaaaatatagatggtcattatcatcataaatcggttcaattgtcagctcattcataaatgaagtgccattttttcggtaattttttagtagaacgttcgcagttgatttttcgttaatggcatgacggattttcgcaacttcctctttgtcagtatcatctccttgcaaaaagtgacaattagagccaatagcttcttctttagtatagccagtaatattttcaaagcctgtgttcacaaaaataatcggattgtttttttgctcaggatctgtaataattactcctacactagacaaatttaatgctttcaaaataacatcgaattttggataagcgctcatctgcgtgtttctccccctttgtaaatacatacctatcataacacgcaaaggaatgaaaacccaatgtctaatttgtgaaataaatcgaaagtaagcaactcacgcgaaaacttagtaactcaggtgtataatagagttagaggtgattggttatgtatataacatttacagatagcgccataaatcggctaaatgcgcttcgttcaaatctttccggtcagttgcatttatactacgatacagaagggtgttcctgtgaaaacagtggtatatttacccttcgattagtagcagagaaaactcctgaagatgatataatagattcaaatatcggtcctgtattaattaagcgctggacggaaatatttctagaagatgcgttaacgatcgattataatgacacagaaaaaacgctggtattaaaaagtgatggacagtattataatcgtaatttgttgcttgtgacagataacgataaagtaattagttgtccaattagttaaatagcgagttagcctagaataaattttattctaggcttttttatgaaaatttcatgagaatgtggtgaaactttcgacatatagttacgctggcttctgatttgtagtaacatggaataggaagtttatacatatggaaggagtgtcatcatggaacaaccatcagtagacgaactaaagcattggcgaaatgttatgcttcttcaccgttttgctctagaagaagtgaacacgaaacttaaaatattgaatgaagaatttcaatttattcacgactataatccaatggaacacttgaaatcacgggtcaaatcactcgaaagtataggggcaaaactggaaaagaaaaatgtggatattacaccagaaaatgcacttaaatatgtacacgatattgcgggaattcgtattacctgttcttttgtatccgatatttttcgtattcatgaaatgcttgccggccaaagtgatataacgattaaacgagtaaaagactatgtgacaaacccaaaaccgaatggctaccggagtttacatttattatgtgaagtgccagttttcttaacaaatcgttcggaaaaaatgacggtggaaattcaaattcgaacggttgcaatggatttttgggcaagtttagaacataaaatttattataaatatcaacaagaagcgccagaagaattagtaaaagaattacaagacgccgcaagaatcattacccatttagatgaaaaaatgaaaaatttaaatgatcaaattgataaatataagaatgaaaaagaaaagtaacttaatctaacagctttgtttctttgtaaagtgagcaaatacaaaggagctgggctgttttatatttgcgagatagtttattttgcttcataataatataggagaataaacgaaaggggacggtacatattggagatatttttatatgttttagcattacttgtagctatttttatttctaatttgcttaatcggtttgttccctttgtttcggtgccgttaattcaaatcggacttggtgtaattatcgctattatgccaattacgtttgatttacaactcaatccagaactttttcttgtaatgtttattgcacccttgctatttaatgatggcagacagacggataaagcggcactttggggaatgcggatgccgattttagtattagcgctcgggcttgtgtttgcgacggttgttgtgattggttattttgtccactggatgattccaaccgttccgcttgcagcagcttttgctcttgcagcagctcttgcgccaactgatgctgtagccgttagttcactttctgggcggattaatttgccaaaacggataatgaatttactagaaggagaagcgcttattaatgacgcttcaggactagttgctttccaatttgcgattgctgcgatggtgacaggcgtatttagtttaatggatgcgagtattagcttttttattatcgcgattggtggtattttagtagggctcgttttaagttggttaaaattccgattgttaaaatgggttcgcggtcttgggatggaagatgttacttttcacatgcttatccaaattttaacgccatttattatttatttagcggcagaggaattacacgtttcaggaattttagcggtagttgcagccgggattatgcattcaatggaacaaaagaaaatggatccacaattagttaaattaaatgttgtttcgcaaagtacttggtcggttattatttttgttttaaatggcttagtgtttttactgcttggtacgcaacttcctgcgattaccgaggtagtatggaatgattccggtagtagcaatttacaagtaattgcttatatactttctatcacagcagccttgattttactgcgcttcttatgggtttacatatcatggagcattggcgcaaaacaaaggcaaaaacagaataaaaagacacagctacctaaatttagaccagttgtgctcacatcgctttctggtgttcgcggggcagttacgcttgccagtgcgctcgcaattccgtttttcttagatgacggatcactatttccgcagcgctcactgattatctttatagcgtcaggtgttattctgtgtacgctagttattgcgacgtttatcttacctttactagcaaaaagtgaagaagtgacaacagaagatgaacgagctgaaattgcgacacggattcgaattttgagaaacgtgattagagaattaaaagaacagactttaccagaaacgaaagccgcaacagatgaagtaattgaagactaccgcagacggatttatgatttacagcaaaataatatttcgaatcgaggcatggatgaaagagaacgggcgaaacgattagaaattatccagtgggaacgtgaaaacacccaaaaaatgaccgatgaaggacgcattgttgctacagatagctatcgttatcaacactatcttaatatgatggaacaagcgattaaacaacgcttccgaacaaaaataaaaacagcatggatgttcctttatcgtctaataatgcttatcattcacccgaaaaaatggcgtagaatcacccataaagtgaaaaaaggtatttctaaagatagcgaacgattccaagcaattcgccaactacgagaagaaaatgaaatactcattatttctaaactcaaagaacaattaacgaaagaaaatgctgatattattggaccgttaattacggaacacactattttcttagaacgcgtgagaaaagagcacagtccaagaggtaagcgagcaaaattcgaacagaaaaaacgcgaagtccaagtagtggctttccaattagaacgagatattattcagaatatgtttgaaaaaggcgggatctcaagggaattagcccgggacttacgccaaaatctcaacatgattgaaacgtatttatatgatgactttttagaataagagaagaccttaaggacaatgcaacgttcttaaggtttttttgttttaaaatgatttatctatcgtagaaaaaaatcaaaaaaactattgtccatggtaaggctttgttgtataatgtagcttgctgtaagtaaactttgtgtttaatattggtaaacttctatgacttgaggtttactatcactaaacttgagagaaaggacatagacatggatattggcaaacgcataaaaaatcttaggctcagtaagaatttgacacaagaagaattaggcgaacgaacggatttgacgaagggatatatttctcaactagagcgagatttaagttctccttccattgaaacgttatttgctattttggaagtgttaggttctactccgaaagatttctttgatgaagaagaacacaatcaaaaagtaatatacggagaactagagcatactttctttgaagatgaagaaaaaggttacagaattaagtggcttgttccagaatcaaatgaaaaagaaatggaacccgttctacttgaaatagaagcaaacagttgttttaaaagctttgaaccatcactttcagaaacttttgcttacgtgctaaaaggggaagtgaccgtgctgcttggtcgaaatgagtatgtggctaaaaaaggagaagcaatttatttccacgccgcagatgaacatcaaattattaatcgatcaacggaacaagcgacactcatcttagttgcgacagagtcatatttataagggaggtaaatgattgtgacagaaacaattattcgttttgaaaatgtaacaaaacaatttgataatgatccaccagtgcttgacaatgtcagctttgaaatagaaaaagggaagttttatactttgctcggcccatctggttgcgggaaaacaaccattttgcgcttaattgccggatttttagaagcttcagaaggacaaatctacttaggggataaggtaattaaccaaattccagccaataaacgtcctgtaaatactgttttccaagattatgcgttatttccacatttaaacgtgtacgaaaatgtggcttttggactgcggattaaaaaactaaaaaaagacgcaatcgataaaaaagtacaagaagcactgcgctttgttaacttaaaaggctatgaaaaaagagaaattagcgaaatgtctggcggacaaagacaacgtgtcgcaatcgcgcgggcaatcgtcaatgaaccagaagttattttgcttgatgaaccactgtcagcgcttgatttaaaactacgtactgaaatgcaatatgagttgcgcgatttacaaaaacgtcttggaattacgtttatttttgtgacacatgaccaagaagaagcacttgcgatgagcgatgaaatttttgtgttaaataaaggcgaaattcaacaaagcggtacgccaattgatatttacgacgagccaattaataaatttgtcgcagattttatcggcgaatcgaacattgttaatggtaaaatgattcaagatttcgaagtggaatttgtggaaagacgttttgaatgtgtcgaccaaggtttccgtccaaatgaagtcgttgaagtagttattcgtccggaagatctagagattacttcggctgaaaaaggaaaacttcaagtaaccgttgattggatgctattccgcggtgttcattatgaagttggttgtattgatattgatggaaatgaatggcttgttcacacaacgagaaaagttcgtgtgggtgataagattggcttagcgtttgaaccagaggcaattcatgttatgcgtcttggggaaacggaggaagaattcgataagcggcttgatagctacgatgaggtgcagtaatgaatagacgcacccgtacagtttatctcgttccttatgttctttggattttactttttgttgtcgcaccgattttattaattgtgtattattctttttttgatgtagatggcaattttacgatagataattatattcactttttcactcctgtatatttaaaaatgacagctagttcgttctggtacgcgtttttaattaccgtttttacgttgttgatttcttatccaacggcgtatctgctaacgaagctaaaacataaacaattgtggttattactcattattttaccgacttggatcaatttactgcttaaagcgtatgcctttattgggatttttgggacatacggggcggcgaatcaatttttagaaatacttggaattggctcgaaacagattttatttacggactttagtttcttatttgtatcaacctatatttttattccgtttatgatattaccgatttttaatgcaattgaggaaattaatccaacgttgattcaagcgtcacgcgatttaggcgcatcgagtatgacgacatttagacgagtgattttcccacttactgctgacggtgtgaaatcaggatgtcaggctgtttttattccagcgctatcactctttatgattacacgattaattgcaggaaaccgtgtgattacgctcggaacagcgattgaagaacattttcttgtcacgcaagactggggaatgggttcgacgattggcgtatttttaattattgcgatgattttaattatgttcctaaccggttcgaaaaagaaaagaggtgcgcgtaaatgaagaaaagtaaatggggtacgatttatttagtgcttgtttttgtgattttatatgcgccgattttctatttgattttttattcgtttaataaaggcggcacgatgcataattttagtggctttacgcttggttattataaagaagttttccaagatacgcgtctactaattattgttttaaatacgtttgtaattgcgctgctttcttcggtgattgcaactattattggggtttgcggggcgctggcgattaaatttatgccaaaaccttttgcgaaaaactcacttttaagtttgaataatgtgttgattgttagcccagacgttattattggtgctagtttcttgattttcttcacgattttaggtgtaaaattaggatttatttccgtgctagtttcacatattgcctttagtattccaattgtcgtattgatgattttgccgaagttgcaagaaatgagtccgacgttaatggatgccgcgagagacttaggtgcaagccagtggcaagtgctttcaaaagttattttgccgtatattatgccgggcgttttggctggatttttcatggcattaacttactcgctagatgattttgcggtaacattctttgtaactggaaatggcttctcgacattggcggtagaaatttattctcgagcaagacaaggaatttcgctttctatcaatgctttatcgacactgattttcctatttacaattattctcgtgatcggttattactttatcaaccaacgtaatacaagtaaaaatattcggacgggggcgacgaaagaatgaagcaactgctgaaaatttttgtaccagtaattgttgtcgcgctcctaatgatgctacttgcaacaacgatgaaccgctctgagggctacgctgggagtaatacgctgacaatttataactggggcgattacattgatccatcgctcattactaaatttgaaaaagaaactggcatcaaagttatttaccaaacatttgattctaatgaagcgatgatgacgaaaatcgagcaaggtggaacgacctttgatattgcggtgccaagtgattacgcgattagtaaaatgaaagaagaaaatttgctgattccgcttgatcattccaaactaccaaatgaaaaataccttgatccgcgttttatggacttgtcgtttgatgacgataataaatattcgatgccttatttctggggaacgcttggcattatttataataaagaaatgttcccggacaaaaatttcgatacgtggaatgcgttatttgatcccgaattgaaaaaccaaatattgctaattgatggggcgcgtgaagtgatgggacttgggctgaatagtctcggttactcactgaacgatacgaataaatcccacctacaagctgccagagacaagctagaaacgatgacgccgaatgtcaaagcgattgttggcgatgagattaaacttctcatggcggacaatgaagcgggtgtcgcggttactttctccggagaagcagcggaaatgctaagtgaaaatgaagatttagaatatgttatcccaaaagacggctccaatttatggttcgacaacatggtcattccaaaaacggcaaaaaatgtcgatggcgcgcataaatttattaacttcatgctaaaaccagaaaatgccgcaattaacgctgaatatgttggctatgcaacaccaaatgaaaaagctgttaaattgttacccaaagaaatttcgggtgacgaacgtttttatccggatatggacgaactaaataatttagaagtatatgataacctcggtaaacgaatgttgtcgtattataatgaattatttttggagtttaagatgtatcggaaataattgggaatcttggtaaaaaataaggagaataagctaacatttttacttctggtttcccaaaatcaaccccaaaaaagcgacgaaattgtcgcttttttttttggtttttcaaccagagaattttagctagaaatgggagataaaaactgtttttaaatgtttctttcaagaatgtttttcaataatttttttatctgtaattatagttagttggtatatatttcaattgaatcattggcattatttgttttttgtagtattatcttcatgtaaaacgaagggggattaattgaaaattgataatatagtttaagagaaatatttgataactatcaataatttctctgggagttttcggggtaatctaaagggagaagtgatgtaagatgcatttgaaaattgcgatatgtgatgatgacaaggtagtctgtgcccaaattgaaagtatgattctacaatatgcgcaagaatctgggtttgatgtcaccattcatatattttatgatggaagttcactaatggaagggattcaaaatgatgataattttgatttaatctatcttgatattgaaatggatggaatcaatggtgtagatgttggtatgacaattagggacaaattaagggatcataagatgcaaattgtttatgtttctggaaaaggacaatatgatcgtcaattatttgatgttcagccattattatttattccaaaacctattgaggaaagtaaactagtaaaatctatcaatttggcaagggaaaaattggcattaacaccaaagttatatcactataaaaaacggaaagaatattttagtgtttggatggaagatatcatctattttgagaattctggtaggaatgtgaaaatcatgacaattgatggcacggatctatttgttggaaatattaaagacatagccaaagaagttctcccatacggatttattcaaattagtcaatcgattattgtaaactataactttgtgagtaaatattctcgtgaggagattattttaataaacaaagaaaaaattgcaattccaaaaaataaaaggaatggcgtaaaggaacaatttttaagagaaagtgataagcatttataaggcgttttaagcttgtatttgtttactaaaataaggaatagtattagggagagaataataatgatattcaatatgcaaacttttttcgttcatgtttatgttagtggattggagtatttactaatatactttcttttttcacgatataaaccaatgaacccacgagtgtcaaaggagaaactcattctaattttttgcatagctagcctagtacaagcattttttgattcatttgaatactttaccatcaatgtaatagtttctgcggtattatttctagttgtatctttcttcttttttacaaagtggcaggatattttgatgtcttcaatcattgctacagcagtaatcgatattggagaaggtattgctttaatgtcattaacgagtacagcgataggaaggcaagatgtaggagaatttatgttgcaaccttcaaatacaatgctactttttactatttctcgtttgattagtttgggattagtgctgattattttaagatttagaaaaatacgtttaggaaatggcagtttaccaactatttattggacgacatttttatttattacaatgaaagacattttatgggtgttaatcttagcggattcccctgtagaaatatccttctactattgggcagcagttattccactcttaccggtatcctatattttattttattatacacgtcgctcaatagaaaaaatggtgaaaacgcaagtagacagtaaagtgctagatgaaaaaaataaatactatgaacaacagctcgttacaatgaaacaaacacttgagtcacaaagaacagttcggcatgatttaaaaaataagttatcacccctaatttatctagcggaaagtggtaagaccgacgaattggttgagcaggtacaagagcttggtagtttaagtgtacttggtaaaatctatgcagattcagggaatataacgattgactatattattaatctaaaactgcaagccctagcgaataaaggcgtaacaatattttgcgagataaatgtccctaatgatatagatgttgtcccctttgatttatcaacggttttagggaatttaattgataatgcagctgaagcgttagagtatgtgcaaaatgaaaagtggattgggattaaaataagttatcaagttggctttttgatgatacaggtggcaaactcttttgatggaattgtacatttagataataagaaaatcatttctagaaaagaggatactgagaatcatgggattggtttaactagtattaaaaaaattgctggtaaatatgatggggaagtggttgttcaacatgatgataagcaatttgatgtgattgtaaaattattggcttaatattttgatataagaggcgtttcctttagataggaaacgcttttttgttatcacgaattaaatcgcaatggataagataaattaactattgaaattgctagagataaaggaataaattttgatgattttaaggaaatgtgcaaaatattacgtttagaggggcgaaatcagactgatatagttaaatgggttgtagatgagttatcatatgcagtgcatttgtttttgactacaagattaagtgcacaagatttttaattactaaagtttaacttctaaagaaatgacaaaaaagaaggacaaaataaaagttaagatttattgaaaggggaacataaagtgaagaaaaaaagtatagcaagtctgttaattagcggtattatttttagtcagttagcaccaattgttagttttgctgtggaacaagaagcaaatgaaaagccaacagaactgacgcaattagaagaaaccccgaattcaacagatgaaaaaacaaatgaagaattaaatcaaacagaaatagaggaacaagaaatacaggatgaaaaaagtcaagatactgagagtaatacaggcacggaacattctcaaacacaagagtctagcaaggagtcaaatgagacaactaacacccagagtgaaataagtgctgaacaagctacaaaagagaaatctaatgtagaaaaagatgtaaatcctgaaataatcaaaggatcatggggaacagctccttatgaatataatcaggatactggggaacttaaagtaggcggtggagatttatcaaattggtataacactaccggttttattataagtaaagcagatgacgcagaagttaaaaaaattatttttacagaaccggtaaatgcaccatcagattctactagattatttgagggagatggattcaagagtttagaagaaatatgcgatttatcttatttggacacgtcaaaagtaacaattatgaccgctatgtttcatggtttgaaaagcgtaaagagcttagatgtcagtaacttcgatacaaaaaatgttacagatatgaggtacatgtttcagggaatgatagccttagagagtttagatgtcagtaacttcgatacaggaaaagtgagaagtatgtactacctatttgcgaatctgaaaagtataaagagtctagatgtcagtaactttgatacaaaaaatgtgacagatatgggcgccatgtttatgggtatgagtagtatagagagtctagatgtcagtaactttgatacaaaaaatgtgacaaatatgggcgccatgtttatgagtgtgagtagtataaagagtctagatctcagtagctttgatacaaaaaaagtgacatatatgacaagcatgtttagatattcggaaagtctgacaagcttagatataagcagttttgaaacgaatagttctacaactgaaatgaagttaatgtttgacggagccaataatttgtccctcattaagttaggaaaaaaaataaagttttatactgtggctacgtatgaaaaacttgttaatccaccccgcagtgcaccttataatggaacgtggacgaaccctcgtacaaaacgaacaattttgtcagactctttaacgatgaaatacgacggtgcaaccatgtatggatattatcattggtctgctgtaaataatatcatagccattgattctactatttattcaggtgatgactggaaagctgaggataattttatttcagcaacggataaagatttcaatctaattgattttccgctggtaacagtaacaggatccgtagatactacgacacctggtgaatatgaaatcacatatagtgtaaatggcttgactactacaatcacagtaacagtgaaagaaaatcaagcaagtgttgtagcggaaaactcaactatctatacaaaagaatcgtggaaagccgaagataattttgtttcagcaaccaataaaaaaggtaaaattgcagatatttcgtcagttaccgtaacaggggaagttgatgtaaatacaccaggagactacgaaattatgtatacaattgatggagtctctacaaaaataattgtgacggtgaaagaagataaaagcagtatagaagctaaagattcaattctttatataggtgatacgtggaattccaaagacaattttatttcagcgacagataaagatggtaatccggtggactttaaggatattaaagtagaaggcacagtaaacacgataaaaccaggaactaacaaagttacgtatttgtatggaaaccaaagtaaggaagttaccataacagtcaaagcggatcaatcaactttagaggccaaagattcaattatttatactggagataagtggaatgccaaagacaattttattacagccacagataaagatggtaatccagtagactttaaggatattgaagtcgaaggtacagtagacacaacaaaaccaggaactaacaagattacgtatatatatggaaatctaagtaaggaagttaccgtaacagtcaaagcgaatcaagcaactttagaagccaaagattcagctctttatgtaggtgatacgtggaattccaaagataattttatttcagcaaccgataaagatggcactccagtagactttaaggatataaaagtcgaaggcacagtagacaccacgaaagcaggaactaacaaggtaacctatttgtatggaaaccaaagtaaggaagttaccgtaaacgtcaaagcggatcaaacaactttagaggtcaaagattcagttatttatactggagacaagtggaaagcagaagataactttatttcagccacagacaaaaccggaaattcagtaggctttaaggatattaaagtcgaaggtacagtagacacaacgaaagcaggaactaacaaggttacctatacgtatgcaaatcaaagcaaggaagttacgataacagtcaaagcggatcaagcaactttagaagccaaagattcaattatttataccggagataagtggaaagcagaagacaactttatttccgctactgataaagcaggaaagacaattgactttaaaaatattaaagtggaagggacaatagataccacaaaagctggtaattatgacatcacttattcttattcaggagtgactcgtagtactgaattgagtaaaacaattacagtaacagtcaaaaaaaatcaagtaaacttggaagcgaaagactcaactctttatgaaggagacaagtggatagctaaagataactttgtttcagcaaccgataaagatggcaatacagtggactttaaagctattgaagttaaaggaactgtaaataccacaaaagcaggaacttacaaaatcacctattcatatgcaggcatcagcaagacaattacagtgacagttctagccaatcaaactaaaatcgtagcgaaagatttaactatttatgaaggcgacaactggaaagagcaagacaactttgtttcagcaacagataagtttggacaagcaattgactttaattcagtaaaagtaacaggttcagtagatattcaaacaccaggtaaatatcgaatcacctacagcatagaaggtgcatctacaaccattacagtgacggtcctagcagatcaaagtaaccttgttgctaaaaactcaacgatctatgtaggcgacaaatggcaatcaaaagacaactttgtttcagcaacagataaatatggtaaaccaattgatctttcacttttaacagtgacaggaacagtggatacgactacacctggtgagtatgaaatcacatacagtgtcaacggattgactactaccattacagtgacagtgaaagaaaatcaagcaaatattgtagcagaagattcaactattcatgcaaaagaatcgtggaaagccgcagataattttgtttcagcaacagataaaacaggtaaaaacataggtctttcatcagtttccgtaacaggaaaagtagacatcaatacaccagggaattacgaaatcacgtatacaatcgacggtgtaagcacaacaataactgtgactgtgttagtaaatcacagccaaatcgaagcccatgacgctaaaataaaagttggaacatcatggaaaccagaagacagcttcattttagctaaagataaattcggtgaaacagcagacttctcagatgtaacagttgaaggaacagtagacacaacaaaaccaggtaaatatcaaattacgtatacaattgatggagtgtcagtcactattacggtaatagtagaagataattcaaaaggttcatcaaacactatcaccatcccaccaactaatcactcaattggtgaagaagaaacaagcaattcaaatgacaaacaacttccaaaaactggagaacaacaaaataacttcatcttattaggtggactagttttagtagcactagcttttatcttaggcaaaagaaaaatgtataaataagtaaacaaaatagtagaaaatttgtttttaaacgaggaacttttaaattatctatagaaagtgatttgttaaatgagacgtttcctttaaaactaggaaacgtcttttttgtactaaaattgatttcaattcaataaataactatcggatagattgttatcaataaaacaggtgaaataaatttataagaggtagaaaaatgaaaaaaataagtttaacattcatgcttatctgtttgagtctaataggaggtattttctattcatcctctgcagtatcagcagcaggatttaattacacagcaacacctattttaccaagtagccaagaacaagatgttaccagttatttcaaattaagagtgacaccaaatcaagaagaaacattacaagttaaaatagagaaccagtcagacgaaaatcaaaaatttaaagtgattgtcaacacagcttcaacgaatcaaaatgggattatcgattacagtttacatgatgttgaaaaagattcttcaatgaaatattctattcaagatcttattacaagtgatttaccaatagttgaggtagcggcaaatagtgagcaaatcgtttctctcaagttgaaaataccagaagaatcatttaaaggtgtccttcttggtggaattacaattgaaccttttcaagatgaaactaagcaagaacaagtaaacaatgtatacacccgtacttttgcgattcaaatatctgaaaatgacgaaccaattccggctaagttagaagctggagaagtttctctttctcagattaattatcacaatgtagtcagtttattaattaaaaataaagcaccaactattattacttcagttgaagcaaacattaaagttactaaaaaaggccagacagagccactgttaaatgaagtgaaaaaagatatgagtattgcaccaaattctcaatttttccttcctgttgagtggaaagatcttttttcagctggtgaatacgagtatgaagtaacattgcatagtcatcagcaagattggaatttcaaaaaagcgtttagtgtgaaagacaaggaagcaaaaaaattaaatgatttatcaattgatgaaaaatcagatagcggaacatatatttacccaatccttgtatttattaaagtagctgttattttaatagctttgtatttgttcaagaaaaaaagatgatttcatttgaaagtttagaacaaattatcgttctgtaattccataatatgataggtgagacgttttctttaaatcgaaaatacctcatctcaaacaattagactcttgtattctaatacaagagtcttttttacggttccttatttttgattagatgaggcttggtttgcgtaagaaaacaaattttcagttaaagttagggagaatgttgtcctatcaatcatgcccactattttatcgctgtcatacaaatctagtaaaaattgggccatttcatcacttgtatgataattattaaattttttgtcatagtcatattcgcttacatcatttgctttttgcccaaattcggttttggtggcagctggtgctaatacttttgcttgaagtggagaaccgctttctcgtaattccaaacttagtgcttcagtaaaggaactaacatagaatttactagcacaataagttgttgcagtaggaaccatcgtatagccacctgctgaagaaacattaattagttgtgtacctgattggtcatgatactttctaacatacaagaccgataaaactgttaatgcttcaatattcaaatgaagaagctgtaaagtcttagttaggttctggtttttaacttcactataatatcctagaccagcattatttacccacgtttcaatgaaataaaggtccaattcagaaaataatttctctaaacggtctatttttgttaaatcaatcgctttgattaggacttcaacttcgggtacttccttctcaatctcgtttttcaacttcaccaaattagctactcttctggcaattaagattagattttttttgcgttttgcaaactgtttagcggtagcatagccgatgccggaactcgcgcctgtgatgacaacatattttttcatagcaattcctcctagcattttagtatgaatcaactataaatgctggagttaacaccatgtcaactcttcttatacgagcaaaaattatttaatatctcgttcactcaacatttccttataaatatctattttatttagtagaaactgggtatatagctcaatttcttcccttttctcaactaaaatatcgtattgcctatataacaaagtcattcgttgctcgatggtttgatctcccagataccgaagttttgcatattccttaatatctttaattggcatgcctgtctgctttaatttttttatgaagttaatccaagtaatatccgaactatcataaattctacggttaatctcatttctttttggtaaaattagtttttctttttcataatatcgtaatgtatcaattgataaaccgacttcttttgaaaatgcaccaattgtgtaattcacgagtaatcatctcctattttaaatggatatggtgttaactccagcatactacataaaaaggagcgggggaaggatgagtgaaacgaatacgatttttactgaatatcgttctagaggaaaattatcaacatatattatataatgttctaaactggatattttctgcttgtgatggaccgaaaataaagctaccagtatctttcagcaggttcacgcgagagtcacaacacgaacattaagcatataacttgtgaaatagatcagctatccgctaaaataatgttacgcaatttttttcgaaaaggagaattggttatgactaaggagaaagtgttatggggttacgatgaaaagactgggccagaaatgtgggggcatatctgctctgactttgaaatcgcacatactggaaaggcacaatcgccagtaaatattgaacaagctgacgttgtgaaattaaaaccatcaacaatgaaattttactataaagaaacagactatacgattaaaagaattgagcaatcggtgcatgtttttccgcatgacaaagaacaagggctacgctttaacggcgagtattatccgcttgtatcgttccatgcacatattccggctgagcatttgcttgacggttatgtatatccgattgaatggcattttgttcatgaaaaaccagacggcacaacacttgtaatgagtgcttggatggaaattgataatacaaataatgtcgaattcaaagatttaccaacctatttcccagaagtgttcgctgattttgaaacagaacgggaaattactttagacgtgaatgaatttatgccagaagaacgtgttttctatacataccaaggttcacggacgacaccaccaaccgtggaaggcgtgacttggatcgtgttgaaaaatgcgaagacgcttggccaagaagattttactgaatttgaaaaagcaattggtaatacaagccgaccagtacaagatttaaatggtcgtgaaattactttttacaattaaaaaactagaaagcctcgctcgaatcttgtatagtatagacatagattctgagtggaggcttctttttatgtatgaaaaagcgagacagatgatgatcgaagcgcatagtggccaagttcgcaaaattactggcgagccttatttttcgcaccctttaaatgtagcgagaattttacgccgtgctggttttcgcgaagaagttgttgtcgcggggttgttacatgatgctgttgaagatacggagatgactgatgccgatattcgcgcaacatttggtgacgaagtagcagatttagtagcttctcatacagaaaataaaacattatcttgggaagaacgaaaagcccatacgattgaacaagtccgcactggtagcctagaagaaaaagcgttaatcgtggcggataagctagataatttaacctccgtcaaatatgccttaagctcagaaggcaagtctgtctggggctattttaaacgtggctatgaactgcaaaaatggtataacgaaggtattaaaaataatatggaatacgggttaaatccatccgacgttcctagtttctttgatgaatacgcgcgacttgtgaagtggatttttaagaagtaaaattttgtatcaaaatatctgttaaattaggtatttagaattaaaatgataagtttttagaaaataagtttctttttccagaaaactattgtaaaatgaaagcgttataaaacttacgagaagggaagtttttttgaatggtttatggagcaattgaagcaggcggaactaaatttgttgtagcaattggtgaaaagtcagggaaaattattaaacgcgagagctatccgacaacggaacctgcagaaacaatgaaagcagtcattcaatttttcaaacagtatcaagatgaattaaaagcaatcggaatcggctcttttggaccgattgatattcaaaaaagtagtgctacatatggttacattacccaaacgccaaaactagcgtggcgtaattatgatattgtgggcgcaatgaaaaaagaatttaatgtgccaattggctttactaccgatgttaatgcagcagctttaggagaggtaagtttaggcgcggcggcaggtttagacagttgtatttatttaactatcggaacaggaatcggtggtggtgcagttgtttctggcaaaattctagaaggtttctctcatccagaaatgggacatattatggtgcgtcgtcataagcgcgaccgtttcacgggaagttgcccaagccatagcgattgtttagaaggtctcgcagctggtggggcaatcgaaaaacgctggggtcaaaaagcagcagaactcgcagataatgaagaagtgtggaatttagaggcgcattatatcgctcaagctttaatgaattacacgcttattttatctccagaaagaatcgtgttaggtggaggggtcatgaaacaacgccaacttttcccacttgttcgtcaaaaattaaaagcactcgttaataactatgttcagctaccagatttagatgaatatatcgttcctccaaagttagaagatgacgctggaattactggctgtgtcttgctcgctgtggatgcggaagagtccaattaatggcgaaaaacagctctagtttatagggctgttttttgatatactaaattgtgataaaacaaacaagaacgcaggaggaaaaagatgtcgattacgaacttattaaatattaaatatccaattatccaaggtgcgatggctcaaattgccaaagctccacttgtagccgctgtgtctaatgcaggcggtttaggaattatcgcttctggcggaatgactgccgagatgctacgcgaagaaatccaaaaaacaaaagcactgacagataaaccatttggtgttaatttaatgctaatgatgacaaatattgctgaattaaccgaagtaattatagaagaaaaagtgggaatcgttacaactggagcgggaacgccaaaaacatttatgccaatttggaaagaagctggaattatcgtgattcctgttgttccatctgtcatgattgctaaacgtatggaaaaaatgggcgcagatgcagttatcgcagaaggaacagaagcgggtggacacgttggcgaaacaacaacaatggcgctcttacctcaaatcgtggatgctgtaactattccagtcattggcgcaggtggaattgccgatggtcgcggaatcgctgcggctctagctctaggtgcaaaaggtgtccaaatcggcacacgcttccttgcaaccgatgaatgtccagtacacccggacttcaaagcagccgtgattaaagcttccgaccgcgacacaatggttactggtcgaaaagctggcgcgccagttcgctcaattaaaaataaaatgatcaaagaatacattcgtttagaagaagaaaacgccgatcgcgacacattagaagagttaactttaggctctttacgaaaagcagtacaagaaggcgacacagacaacggctccgtcatggccggccaaatcgctggtttaattacagaaatcaaaccttgtaaagatgttattgaagagatgatgacagatgctaagaatgtgattgctgggttagaattaaattaatgttttaaactgctttcttttgaagcgtttgaataaaatagcttcgatagattccttaatattggatttttagtaagtcataaaaagccgtgccagttcactcagtgctgatacggcttttttagttagtagaaaaattcatttctgtttcatcaatacatcctctatgttatactaatgtaaagttatattgttgcaaatgcaataaaaggaggttggcgatgaaagatatattaagagatataggtgttattgcacgtgcacttgattcaataagtaatatcgaatttaaagaattaaatctagcaaaaggacaatttatttatctagttagaatttgcgagaaccaagggattattcaagaaaaactagtagatattttaaaaatcgatcgaaccactgcttcgagagctattaagaatttggagaaaaacggtttgattataaagaaacaggataagaataataaaaaaaataaactattattcccaacagagaaaggacagcaactatatcccttaattatccgcgagaatgaatactctaatgcagtagctttaaaaggatttactgaggctgaaattaatatgctcaccgatgcgctcaagaaggtcaaagaaaatattgcagatgactggttatatgtcaaaaaaggcaataaaagaagttattaatttggaggaaatgtaatgataaaattatgtacaataagtgattcccaagcactcttagaagtaagttataagacatttgatgaaacatttagagcgcaaaataaaccggaaaacatggatgcatatttaaaaacaaattttacggctaaaaaattaagcgatgaactaaaaaacccacattcctatttttattttgtttttcaccaagaagctattgctggttatttaaaactaaatataggagatgctcaaacagaagaaatagctgggaatacaatcgaaatagagcgtatttatgtattgaattcattccaaaaaaagggattaggtaaagagttgtttaatcaagcaatagagatagcgaaagaagttgatgcagaaaaaatatggttaggtgtttgggagaagaataagaacgctattcaattttatgcaaagctgggttttattaaaaatggacaacatgattttttcatgggcgatgattgtcaaactgatattattatgataaaagatttataaaaaaagttgagcgcatactaagctcaactttttttatcaaaattaagctgccaaaacaccccaaaccggtccgtcacctgcgcataagtcgaaccccagaatgccacttgcaactccatctccactttacccgtagcgcttaaaacttcataggcgtacttaatatcatcctctgtttcaaaattaatcaggatcgtcacccgattaccaattgtaaaaccatcataaggcgcatcggtaatataaataaattcttcgccgttttttgctaaacgactatgcatcaatcgctcaccaaaaacggcatcaccatcaaaattgttcatttctttaaagcgctgtacacttgtaatttcagcttgaaaaacatctgcataaaatgttaacgcatcctgaccttcgccgttaaaaactaggtatggtactgtaaaaggcatggaatcatctcctttagaattaatagcttaagtataagcctaaaccgctttgaagtcatgtttgagagaaaaggatatttgtaaagaaaaacgaaatacttgcaataaaacgtgatatattatacaattataataagaaagcagatattttaaataaatatttttttgcaacaaaataaagtaagtacttgcttttagtagtaggtacgtaggaggtagatgtatgctttgggtaaaagagtcagtcgagcaacttcttagcaaactacacacaaatttagacacagggttaacgaaagaacaagtgaaacaaaaacatgcagagtttgggacgaatgaatttgaagaagggaagaaagaatcactacttcaaaaaatcggtcatcatttgattgagattacgacgattgtcttgctttttgcagcagcaatttctgcatatttagcaattacaaccggatatggttgggcgaaggttgttgttattttaggaatcgttgttttaaatatggtgctcggaatttaccaggaaaacagcgccgaaaaagcacttgctgcattacaaagtatgaatgcgcatttaacgacggtcgttcgtgatggtgtgcggatgcaagtggacgcaacggaattagtgccaggggatattattgaaatcgttgcaggagatatgattccagcagatgcgcgaattatttcaagcagcagtttacaagtcgaggaatctgcgttaactggcgaaagtgttcctgttgaaaaggatgcaaatgcggttgtttcggaaaaagcaccaattggcgaccgtctgaatatgctttactcaggctgtcttgtaacgaatggccgcgccacggcagtggttgtggaaattgggatggaaacagagatggggaaaattgctggacttttaaacagcacctcaaaactgatgacgcctttacaacttcgcttaaaagaattagctaaacgacttagtattgtagcacttttagcaggtattttaatttttataattgatgtatatgtgtatggggaaacgattattgaaacattgatgatcgcgatttctctagctgtagcagcggttcctgagacgttgccggttattgtgacattaacacttgcttacggcgttcaaaatatggtgcggaaaaatacgattatccgccgaattccagcagtagaaacaatcggaaatacgtctgttatttgttctgataaaacaggaacattaacgcaaaataaaatgattatccaacaaatttgggcagcagaccacgcaccgataaaagcaacagctgaatttgatactgcagaacaaaaagtattagaaatgctgagtctttccagtaacgcgacgattgatgtaacagacggcgaagaaaccattattggtgacccaactgaaagcgcgattatccgtttactagaagaaaaaggaacaacgaaaaaagcattggaagccaaatatccacgcgtgttcgaacttccttttgactcagatagaaagttaatgacgacgattcaccaagtagaagacggattcctttctattacaaaaggtgcttttgaccgcattccggtaaatttttcagcggagtttttaaaagaggcagagcaagtacatgacagttttgcagaagaggcattacgggtgttagttgttgcctataaaaaatatccggaaatgccgactgacttgtctagtgaggcgcttgagaccgacttaacttttgcgggaatggttgggatgattgatccaccaagaccagaaagtaaagcggctgtgttagcggcgaaaaaagcgggtattaagactgtaatgattactggtgaccatattgtaacggcatcagcaattgcaaaagaaattggtattttaacggatggggacaaagcgattactggagcggaactggcagaaatgtcagaagcagatctggagaaaaatattcgagattatgcagtatacgctcgggttagcccagaagacaagattcggattgtcaaagcttggcagaaaaatggtgagattgtaacaatgacaggtgatggtgtcaatgatgcgccagccctcaaggcagcggatgtgggagcagcaatgggaatcaccggaacagatgtatctaaaaacgctgcagatatggttataacagacgataattttgcaacgattgtagatgcagtcaaagaggggcgtactgcctatgaaaatatccgcaaaacgatttactttttactaagtacaaatttttctcaaattttcattatgttaattgcgattattcttggctggggcgcgccggttgtagctgttcagttgttgctaatcaacgttgtatctgatgggattccaggattcttccttagtcgtgaaaaagcagatgattcgattatggagcgtaagccaataccgaaaaacgctggaatttttgcgaatggacttgggaaaaaaatggcgacacaagcggttgttttcactattgtaacgttagctgggttttatatcgggcagtttgtaacgattaataattcgattggtgcaagctatgaagttggaatgacaatggcgttcgttattttagcatggtcatctgtcgcgcacattttcaacgtaagaagcgataaatcgattttcactatcggatttttatcaaaccgtggcttgttctttagtgcgatttgttcgatgctgattattctagggcttgcgattattccaccacttgctaacatgttcttcttagttgagatgagcttaacgcactggattcttgcatttatcctgtcgatgttcccacttctattcgttgaaatccaaaagctaattcagcgtaaaagagcaaaagcttaaaggaggacaactaaatgaatgaaactcaaaaattagtagcagcatctcttgaacgtaactttggaaaagacatcggggcacgttatgaaggaaacgaagaagcgcagttacgtgccgaagaagttattgaggaaattgctatcgttattgcaccacttgtagaaaaattaggaatcgaaagtaaaacagtgaaaaaaacgattccatttttatacgaacttcaaaaaaatcaattttgtgacatgagtgcctatccgtatccgcttcttttggtcaatggaacgagcgcggatactgaaaaatattggcgggatttaccgacatattggacagatgaagctaataaaatcgtgctcccatatgtattagaacatattaaaaataataaagtacgccaaaaactattatctttccatgcatggttgttaggtgaggtagccgagatgaacacagaactcggagctcagtttcgggtgaaattagtttttgagtcagatatgcgcattcgtcttagaatttatgaagtcgagcaaattgccatcgaagttcattttttagataatcatgatacggaacaacaacatttgggctatgatgtgagtttggacgcggaacttgaggtcaaagctagactattgctacgccaagggattttaacagaaaacctaggattggtagcattaaaagcttatattcgctccgttttaccaattgcacatagtttgaaaaagctagaaaaattaacggatgaagaggcgaaaaaattaactaagtggttaacgcacgaagaaccaaaaatcatggaagatacagatttaactagtaaagcactcgatttcttacaaaaagtagcacagcaataagaataaaatgctatttggaggaaattgatcctaaatagcattttatttttgcaagtgagattggtagaatagtaaaatgatacaatgatattagaaaagaggatgtaaaaattgattcgacaagccaaaaaatcagacgcgccaaaaattgcgccacttttactcgtaatatggaaagatatggagttaccaattttagaagtagaaacggaagaagcaattacaaatgcattaattgaagcgattcaaaccgaggattaccgttatagctacagacatcttcatgtatttgaaaaagatggagatattgccggagttttagctggctatcctgggaaaattgaaccggaaatcgaccatgcgtggaacgagattgcgaaaaaacacggaattacttacgatgcgccgatttttgtggataaagaaacatttccaggtgaatggtatttagattcaatcgtaacaaatgaaaaataccgcggtcacggcgttggaacagctttacttgctaaattaacagaaattgctgcaaacgatggtgaaaaagtagtcggtttaaattgtgataaaggaaatccacatgcgaaacggttgtatgaacgcttaggttttcatgtgactggggaaattaaactgagcggccacgactatgaacatatgcaaaaataagaaatgaggcaaaccaatgaaaaaaattattttcacgctgttacttagtttagttttagtactcgcaggatgcgccaatgtaacgaatacggtgaaagtcgacaaaaaaggtgaggcaatgatttcctttgacatcgatatttcatctgtagcaggaattttcgcatcaggttattcaaatcaagtggaagctaaactaaaagaagctggctttactgttgataagaaatcaaatacaagttatcatatcgaaaagaaattagcgaaggatgaaacgacgaaaagcgatatggagccagaagattttggcgtgaaaattactaatacgaaaagtttcttcacacaaaaaatcaaagtggatgcaaatattgacatcgagaaaatctggaaaaaagaagtagcagatgtcccgtttcctaaagaaatactaagtcaaatcgactatacttttattttagatttaccagtgtcgtcaattggtgataataatgctaagagcgtcgatggcggaaagctaacttgggacgttccacttgatcaaaaatccgaaatgtattttgaagtcactgtgccaaacgtgaaaaatattgcgattgttggtggaattctactcgtagcgataattggtttattgatttaccttattagaaaacatcgtaaaaagaaaagattataataaaaaagtgtgaatcagttagctaagctgattcacacttttctttacgtctttttctaattcttcatagcaagctagttttttctcgatttttttaaatgcgcggtccagttcagcttgccggcgatacatatcttgttgatgttctttaagtacagcgattcgttctgatactgtttcgtcgccacatttagttaattcaacaatttctttctgtttcgcaagtggcattccagtgacacgtaaacaagtaagtaattcaagccagtgcagggcatcattatcgaaaatccggttattatttttatcacgtgctagaaatggaattaatccttctcgttcataatagcgaatcgtatgggcgcttaaacccgtgtgctcagaagcttctttaattgtttgttgcactaaaatcacctctttttttcttaataatagcaccttgaaaatcgaaaagccaaatgtttgcctttgagtatactctaaggtgtatagtaaacgtgttaatacttttaggaggcggataaattgaacttaaaagatacagtaaaacttgcaaatggtgtagaaatgccacgtttaggatttggcgtatggaaagtgcaagacggcgacgaagcagtaaattctgttaaatgggcaatcgaagctggttacattagcattgatacagctgctgcttacaaaaatgaagaaggcgttggtcaagcgattaaagagtctggcgttaaaagagaagacttattcgtaacaaccaaactttggaatgcagagcaaggctatgaatctactctagctgcttttgatgaaagcttacgtaaactagaacttgattatgtagacctttatttaattcactggccagtcgaaggaaaattcaaagatacttggcgcgcttttgaaaaattatataaagataaacgcgttcgcgcaattggcgtatgtaacttccacgaacatcacctaaaagaattaatggaagatgcggaaattgctccaatggttaaccaaattgaattacatccgcaattaacacaagaaccattacgtaaattctgtgctgaaaacaacattgtagtagaagcttggtctccacttggtaacggtaaacttcttgctaacccagaaattaaagcaattgctgatgcacatggtaaatcagttgcacaagttattcttcgctgggacttacaaattggcgtagttactattccaaaatcagttcaccaagaacgtattatccaaaatgccgatattttcgacttcgaattaagtgatgaagaagttgcaaaaatcagcggattaaataaagatgaaagaactggcccagacccagataatttcaatttctaaaagaaaaacgaagaaactgctaattaaaataaaatcccttccgacttttcatagcgggagggatttttgttatgtttttatgctacaataaactaaaaaaagaggttactatggagcgaaaaacgattattcaaaagcggttcataaaccaaagattagctgagactacatggctttcgtcccctgaagaagtagtgtttcattttggcgcaatgcagtctcaaaattatggtcaatcactttgggcagttggaagtagattaattactccaaatgagcaaactgtaaaacaagcgattgatgaaggtgaaattatccgaacgtggcttttgcgaggaacaattcatcttttttcggcacgtgattatcactggttgatggatttaattgccccgaggatagataaaatttgtaagccatatcgaactaaattaggtttaacagaagacattctaagtaaatctacggaggttgtaaaaacacttgtagcagagcatgcgataacgcgaaaagacttagctctgaacttagcgaaacatgatttacctagcagcggcatcccgtttgcgcagttattggtctacttaagctcgcggaaaattatttgctctggcgcggatgaaacctttcgaaacacaattcatattccagctcctgagtacacttatacccgagaagaagcgttgaaagaattggcaaagcgctacatacaaagccacgcgccagctacgttaaaagacttttgcttttggtctggattgaccgttaccgatgcaaaaatagctctagaagatttcactaaagaaggcgacttttatttatccagtacaattgaaaaaagtagtccagtacacacggttccgctagcaggttttgacgagtggattatcggatacattgaccgctccatcgttttaccagaagagtggcgtgaagcaattataacgaagaatgggatttttagaccagcgattatttcagccggccaagtcgtggataaatgggaaaaacctaagaaaaaagcggaactaaccggggattactggaaccgttacatccagtttcggaatatgctatagtcaagtaagtgcagaaaatttaatttgaggtgattaaggcaatgaaagcttttgataaattttataaaaaaactttagaagaacgtcgtgcggttttagccgaatatgctgatttaaatgaagaagaacaagcctttttagcttccacaggggctctttctcttgataaagcgaaccacatgattgaaaatacggttggcatatactcgcttccgctcgggctaggaatgaatatgctattaaatgaaaaaaattatattgttccaatggcaatggaggagccttctgtcgttgctgctcaaagctcaggagcgaaattaatcgcgcaaaacggtggtatgaaaggcactgcgactgaccggaaaatgatcggtcaaattgaattaattaacgtgccagatgtccaatctgcggaagaagaagtgcttgctaaccgagaaaaactcattgctattgctaatgacgcccatccttctttacaaaaaagaggcggcggggctattgatctacaagtacgtacagctaaaacggcgagcgaagaaactttatttatcgttcatttacttgttgatacccaagaagcaatgggggccaatatggtaaatacaatggtagaaacgttagcgccagaattagagcttttaacaggtggaactgcaaatatgcggattttatccaatctagtagatgaagcaaccgcaactgtgacctgtcgactttcccctctaagtttagcgacgaaaacgcaaagtggcgagtgggtacgtgaccgaattattgccgcttatgaatttgcagatgctgatatttaccgagcagccacgcacaataaaggaattatgaatggtatcgatgcagttattatggcttttggaaatgattggcgagctgtagaagccgcaagtcatgcctatgcttcccgtacaggaagttataagcccatgtctaagtggtccaaagatcaagatggatatttggttggcgaattaactttaccaatgccagtagcctttgtaggaggttctatcgggattcatccgatcgccagcctttcgaaaaaaattgcacgagtagaatcggcgaaagaactagctatgttagtatgcgcagttggcttaacgcaaaatttagctgctttaaaggcactcgttacggaaggcatccagcgtggacatatgtcattacaagcaaaatcgctggcaatgacagcgggagcagaagcaaatgaaatcgaaaaagtagccaagtttttacaagaaagcaaacaaatgaatgttatggcagcgaaagcatatatcgctactttacgatctgaaaaataaaagtctatgtaaacgacctttacaaaaacttaacaatacattcggaacgcgttaaagcctttattttcaacgtttcacattgtttttaatagaacttcctttacaaaatgaaaaaaatctatttacctcgcttttactttcttttatgatgaaaaaagagtgaaattacaagattacaaacaaaaaggagattttcatgggagacataaatattcagcagatgatttttcaatttattggaggacttggaatttttcttttcggtataaaatatatgggggacgggctgcaaatggcagccggcgacagactccgtgatattttagataagtatacaacgaatccttttatgggtgtacttgccggaattttagttactgtattaattcaaagtagctcaggtacaactgttttgacggtcgggttagtaagtgccgggtttatgaccttaaaacaagcaattggtgttatcatgggggcgaacattggaacaaccgtaaccgcctttattattggtattaagttatccgagtattctttaccaataattgctgtaggagcagtacttttattcttctttaaaaatcataaagtaaaaaatattggacaagtattctttggatttggtgcgttattttatggactggatttgatgggacaagggatgaagcctcttgctagcatggaagctttccatgagttaactgcgcaaatgagtacgaatccattcttaggtttgttaatcggaacgatctttaccgcggtagtgcagcttcaagtgcgactatcgggatattacaagagctatatgggcaaggtgcaattgaccttcaagccgcattaccagttttatttggagataatattggtacaacgatcacagcggttcttgctgccattggagctagtgttgctgctaaacgtgcagcagcgactcatgttattttcaacttattaggcgcaattatattcatgttgattttgccacttttcacatcgctcgtagcttatatgcaaggtttatttggactaaatccagaaatgaccattgcggttgctcacggaacgtttaatgtgacaaatacatttattcaattctggtttattggggcctttgcttggctagtaacaaaactaataccaggagacgattcgcgcattgattataaagtgaaacatctagatacaaacttaatcgatcagtcaccggggattgcacttgaaatggcacgcgaggaaacacttcgcatggcagattatgccaaattaggcctacaagaagcaaaagaatatctcgttaaccaggaaccaaaacatgccgagtcaactgttcaagtcgaagaagcagtgaataatttagaccggaaaattaccgaatacttaactaaaatttcttcggttgctttaacaaacaatgaaacagaagaacatgcgctgatgcttgataccgttcgtgatattgaacgggttggcgatcacatggagaacatcgtagaaaatatcgaccaactgattaaaaacaaagcgaaaatgtccgaagaagcttccacgcagctaatcgaaatgtttgaactgacaacatccaatttcgaacgagcagtaaaagcaatgcataaaaaagaccgagcacttgctgaagaaactattttggttgaaaaagatattgataaagctgaacgtagattacgtaaaagccacatccgtcgcttaaatgaaggcaaatgccaagtagttagcggaattttatatatcgatattgtaagtgatttagaacgaattggtgaccatgcaaataacattgcagagtctgttttagaattaaacgaataataatcaaaaagaaattagctatcgttttagctagtttcttttttttgttaaaaatctacactttttctagtccttgtgaagcattgagtataagcgaatagtggtgtagaataagaatgattataaaactagaatgactggaagtgttgagtcttatgcgaaatagaaaaacgatggatggaaataccgccgcagcttatatttcttacgcatttacagaagttgcagcaatctatccgattaccccttcctccaccatggctgaacttgtggatgaatggtcttcaaaaaacaagaaaaatttattcaatgaacccgtaaaagtagtagaaatgcaatcagaagcaggagcagcaggaacagttcacggctcacttcaagcaggagccttaacgagcacatatacagcgagtcaaggtttacttttaatgattccgaatatgtacaaaattgccggcgaactattaccaactgttttccatgtttctgcaagaacaatttctgcagcctcacttaatatttttggcgatcatagtgatgtgatggcagcgcgccaaactggatttgcgatgcttgcagaaggttccgtgcaagaagtaatggacttatctgccgttgcccatctagcctcgttaaaagggagtttaccatttttaaatttctttgacggcttccggacgagccatgaattacaaaaagtcgaagtgctcgaatatgacgaattagaaaatttacttgataaagaggccttacaacaattcagaaatcgcgcaatgacgccaaataatcctaaaacactaggttccaaccaaaatccagacatctttttccaacaaagagaaacggtgaatcgttattacgaggaaatccctagtatcgttcaaaactacatgcaagaaattaatcagcttcgtggcacagactatgacttagtaaattactacggagcggaagatgcaacagacgttattgtggcgatgggctctgtaacacctgtcatcgaacaagtgattgattatttaactacccaaggcaaaaaagtagggctattaaatattcgtttataccgtcctttcccagcagaaactttcttagcaaaactaccgaaaacagtggaacgtgtggctgttttagaccggacaaaagaaccaggatcaggcggggaaccacttttacttgatgtacaaagtgtgctttatgatagtgaaacgcgtccgctcgttattggcggtagatatggcttaggttcaaaagatgttacaccagaccagattcttggtgtttattcgcacctaacgaccgaaaaaccaaaaccgcgctttacgattggaattacagacgacattacgaacctttccattgaaaatactggaccaagtgatctgacttcagcaaaaacattccaatgtaaattctggggtttcggctcggacggcacagttggcgcgaataaagccgcaattaaaatcattggggataataccgatttatatgcgcaaggctatttctcctatgattcgaaaaaatcgggcgggctaaccgtttcgcatttgcgttttggtgaaaaccgcattcgttctgcctatttaatccaacaagctgattttgtttcatgctccacctcggcctatttacgctcctatgatttattaaaaggcttaaaaccaggcggaactttcttactcaatacgatttgggaaggcgagcagctagaacgccatttaccagctgcgatgcgcgaatatattgcgaaaaataatattcaattttatacattaaatgcgatgagaattgcgggtgaagctggacttggtagaagaattaataccgttatgcaaacggcctttttccgagtgaccgatattttaccgttcgaaaaagcactggctgatttaaaagcatcggctatcgctacttacgggaaaaaagatatggcagttgcggagaaaaatattctcgcgatggaccaaacagttgctaacttgcataaagtagaagtgccggaaagctgggcaaatccagttttaacagcagaagcaagtaccgccactgaaaaaccagcgtatgttaaaaatattctggaacctgtgaaccgtttagaaggggacaacttgactgttggtgatttaatttctaacggtatggtaagcggcgcatatcctccagggacagcagcttacgaaaagcgtggtatcgcacttgaagttcccgaatggatttctgaaaactgtacgatgtgtaatgaatgtgcctttgtttgtccgcatgcagcaatccgtccaattttaacgaatgaagaagaaatggaatctgcaccagaaggctttatgacacgagaaatgcgcggaaaagatggacttcgttatcgtattcaagtttcaccaatggattgtactggctgtaacttatgtgcggaaacatgtccggcgaaagataaagcgctcgtaatgaaaccttttgaagaagttgccgcaaaagaaaatccgaattggtcatttgcgattaatgtcaaaccaaagaaaaatcctggtaagaaaaatactgttcccggcagtcaatttgaacaaccgttacttgagttctcaggagcttgcgcaggttgtggtgaaaccccttatgttaaattattaacgcaaatgtttggcgatcgaatgatgattgctaatgcgactggctgttcctcgatttggggcgcatctgcaccagcaacgccttatactgtgaatgatcaaggacacggcccggcgtggggaaattctttattagaagataatgcagaatatggttacggcatgtatttggcgaaccaaacgatgcgaaaagctttaaataataaagtcacaaaagcacttgcgaatgaaacaatatcagaaggcttacgtgaggctctttctgattggcaaaatcaaatggacgtttcagaagacacacgtgaccgagcagaagctttgcaactcgcccttttaaatgaaatgaaaggaaatgccttgcttgaatctatttaccgtgacagagaattatttattaaacggtcgcagtggatgataggtggcgatggttgggcttatgacatcggatttggcggaattgaccatgttttagcatcaggtgaagatgtgaatatttttgtaatggataatgaagtatactccaacacaggcggtcaatcatccaaagcaaccccaactgctgcaatcgctaaatttgcttctggtggaaaatcagtcggtaaaaaagatcttggaatcatggccatgagttacggtaatatttatgttgctcaaattgcgatgggtgcaagtaaacgccaaaccttgaaagctatcgaggaagcggaggcttatccaggtccatcgttaattatcgcttatacgccatgtattaaccacgggatttctagcgggatgaagacgatgcttagcgaaactcaaaaagcagtcgaatgcggatactggagcttatatcgttataatcctttactagaagaaaaaggtaaaaatccgatggttatggattataaaaaagtggattttgatcaatttgaagacttcttaaaacgcgaaacacgctattctgcattatataaagcgaatccagaagtagcagctaaattgtccgaaaaaacacgcttagatgctgagaaacgcttcaaacgctatgcgacaatggcaggtcttgatttagaaaaaatattgaagaaaaaagaagtatctgaagaagcaaccaaaaaaccagtagatgatgaccgcgcagcaagaaaagcagctagagaagctagaagattagcgcgagaacaagaaaaataaagagaagacccagtgatcactgggtcttctctttatttgcttttgatctgtgggaatcagaagctaagtgggaatgaatagatattcttttatgaacgttataaagaaataactactattttaatataactttttttactaaaacgtgcactagtaaaaatagaacataaatagttaataacgctttatttgttgcagcccagtcagtctagcacttgtgaaagttttaagacaattctaaatctatcgtttaactgttttcgtgaagcgaaccattgcggtaagcctcaaggagcatttttaaatcggtagcttgttcattaagatttttaccaatatctgtatctcgtacacgctttcgattaatttccatctcaataacttgtcgcgttgaaagaatatcggtctcattttttatcgcatcttctttcgtcgtaaacggttgatgactgactaactgcaaaccgtaactattatagagtaatgtgtaaccagcaagcgtcgtttctttatgataggccttagcaaaaccgccatcaatcacgagcattttggtgtttgctttaattggactttcgcctttaccttctttaacgggtgtatggccgtttataatatgtccacattcaccatcgagaccaaattcctccaagatttgtttgcaaattgtttcttcgttgcggagtttataataaggatttttttcttctttgtgtgtttctttttccgcaatgaagtagcgctcaaacgtagtcatctcactttttccaaataacgaagataccgctcctgtccataaataccaaacaatatcacaagcatatttcttctcttttgttccaggtttacgcacgtaggcttcacgagtaagaatttcaaactgttctaaaagctctcgtccagaaaagttttctccgcgtagcttcatttccataaaagttccatcttcataaagaggaatacaaccatgataaagtaagttgccattatacgttaaaaacatactaccttttgaataaagaaattgaacatgtttttgtaatcgacgacaatttttaaacgatgccgtaatcttttcaataagctccttttcttcttttgttagcttataagggtcattaggatctatcgttggaaaatgagtatcaagtaactggtaatctttcccttttaaatggatggttccttttttataatcaatcatttgtagaagcagacgatgattcatatcaaattctttacgtcgattgattatctcaccctctagtttaaactgaatgatcgaaatcgctttatgcattcgcgcaatttgggtaatttcagctttactatagtttaaattatcttcatttttaggttggaaataggtgcaaggatcatttttataaatttcatcagcaaaaagtgcaagtgggcgaagagaaataccataactatcttctaaaatatctaagtttaagtaacgcgcagaaattcgaatgacgttagcagcacaaactcttgagccactagccgctcccatccataaaatatcatgattaccccactggaaatcaagtgagtgataattcatcagtgtatccataattttatctggataagggcctctgtcataaacgtcgccaacgatgtgtaaatgatcaaccacgagttgttgaattaaacgtgataatgcactgataaattcagctgcacgatccagcgaaatgatatgttgcaaaatttcttcatagtacatttttttatcttcttcgttatagttttcatgtaacaattcttctaatatgtaagcaaaatcttccggcatggcttttcttactttcgatctagtatattttgaagcaacatactggcacagttcgattaaacggaaaagggtagtgcgataccaatcatgcatatcgtccatttcttcagcaattaaatccattttctcttctggataataaatcaatgtactaagagaattgatttcagcatcatccaactcatccccaaaaatatcgcggattttacgctttacaactccagatccattccgtaaaacttgttcaaaagcgctatattccccgtgcacatcactcaaaaaatgttccgttccttttggtagattcataatagcttcaaggttaataatttctgtggccgttttagctatagtaggatattgtttggctaataaatgtaaatatttcatatcgatattttccactgataaccgtctccttttttaattggtatagctattatatttataaaatataagtaaatcaaacgttttgttttattattggtctatacaaaaagacgagccggagcccgccttagaaaactggatgaagaaaataaagtacaattggtagcgtaattatacttaaaacagtactaataaacgtcgtactggaaaccaaatctggcttagtatcaaattgaacagccataagagttgtatttgctgctgtaggcattgctgctaacaaaatcatgatttgctttgtcatttcatcgacaggaagaataagagtcaaaccaaatgcgataaacggtgctatgagtaatttcaaaactagcgcgatgccaactttatccagttcaatccgccgaaaagaaataaccgctaactgcattccaagaacaatcataattgttggaatcgcagcatcaccaacaagtttcacacaagtcattaatgcagatggaagcggaatatgtagtagctgaagcataagaccaagtagcgccccgtaagcaatcggcattcgtaccacacgtgtcatgacagttttcataccattcgcatccttgctcccttttgcagcaaaatagattccaatcgtactcattgcaagttgttgtaacaccattaaaacaaccgcaatatcaagtccagccgccccaaaaacaagcaatacaacaggggtgccgtaattcccattattcataaaagcactagctaaaataagcgcacaacgatcttgcacattgtaaccaagcagaaaactaataacactaacaagtaaaattaagcttaagcataaaacaaaaatataaatcgccaaataaaaataatccatcgttagcggattagtataaaaagtattaaatgcaagaaacggcgacataagataaagcgtcagtttcgataaattaggaatatcgaattttaatgttttctgcccaataaaaccaattgcaaaaattccgaaaactggaagtaaaatgaatagaaactccatagcaacacccttttctatatagattgtaaattattgtaccacaaaaagacgttttatatttaaaatagaccaatagtagcccttataagttatctttaaacgattatttttgctaaattatgctagtccgcctctctaacatctgttcttaaaaagaatcgaaagcagctaaatgtactgttttaggaataaaaaagctctttttcatcataaaagtcctaaaaaagtactaaaaaacagagggagtttgacctatgtcattaaatagacactaaaaagacaccttttagccacaaaaataactaaattggtctttttttagtataaaaattttcatcgtataatctataataaatgtgttgattaagaaattttgcaaattccgaaaagtttcattgttgataagaaagtttttactgaaaaataaaaggagataataggaatgaaacgaggctagactgcattaattaacgaagaattggttttatctattaattttcaaaataagggaaacaagaaaaatagttcttttaaatactaaaaaacaatcagcaaaactgctcattcaaaatagtttgaaaaaggaaatattgctaatttgttattactagaaatgagtattaaaagagacgtacaatggggtattaaaacaacacaacagttgactgggaaactactttatgagaaaaacgcacaagaaaggaactgtttatgcctactaaaaaatataccgaaaaattcaaaataagccttgtttatttatatcgcaaaggaacttctaaacaaactctatgcgaggattttggagtttcaagcgcttcactttctagatggattaaatggtacgatgtgacagacgttgatttgaatgaagctgcaaacatcttacaaatgtacgaactaaaaaaacaaaaagataaattagaagccgaagttttagaacttactaaagcgattcaacttttcaattcagatttaaatacagtataaaaaaagcaagcaatcccgaaagtggggttgcttgcttttttagccctctcttttaaggagctttgtattagctaaaaatagtgcagcgacaagaagtaaaatcgcgcctgagagtattagcgtagatgttgcactagaatgatcgacaataataaatcgaataatcgctgtgataccgatataaataaagtagcgcagcgggaaatgaaaatgggattcgaaatattttacaatgagcgcaataaattcaaaataaaggaaaaacgtcaaaatatcctgtgtcatatagtagtaagaaacgtccgtatctaaaaagaaaatattattgaaaatcgtaaatgcctctctaattaaaaaagcaacaagagtaaatccgaccataataagcgccaaatttagagtaatccgtagcaggatgggaacaatagaagaaatcttttctaatcgtttcatcagttgcctcctttccaaaacaatatcgcttttttagtcattttacactataatgggaaccatgactatttttaaggggggagtttgtcattctaaaaaggttttttagttattataaaccgtatcgaacactttttatcattgattttggttgtgctgttttagctgctattttggagctcgcatttccggtcgctgtaaatcacgtgattgatacattacttccaggaaaagattttgggctaattattactgcagcactagccttgttattcttttacatacttaatacttttatgcagtacattgtcacttattttggccatatgctaggtcttaacatagaaacagatatgcgcagagatttattcagtcatttgcaaaagcaaccatttggcttttacgataatcaaaagacggggaaattgatgtcgcgaatgacgaccgatttatttgaaattggcgaagtggcgcatcatggtccggaagatattttcatttcaattatgtcgctatttggcgcatttttcctaatgctaaacattaacgtcaagctggcgatttctacatttattttagtccccatattgacggtactaatcgtatactttaacaaacgaatgaccaaagtaacgaccgggatttttaaagatttagggaattttaacgctggagtggaaaatgcaatcagtggtgttcgggttgttcaggcatttgccaacgaaccgcatgaaaaaggtcgttttgccgttttaaatcaagcgtaccgcaaatctaaactcatgttttacaaagtgatgggacttagtttttcatttaactattttcttatgcgattaattagtttatttgctttgttattcggagcttactttaccattaatggcgaaatttcatatggtgaatttgtcgggtttattttactaacgaatgttttcatccgaccaattgagaaaatcaataatgttatcgaaagttatccgaaagggttcgcgggctttaagcgtttcctagaggtgatggatacggagcccgcaattcaagatgaaaaagatgctaaaccggcttcagctttccgcggtgacattgaatacaaagatgtttcttttgaatatagcgatggaaaaaacgtcttaagtcatattaacctttcgattaaagctggcgaaacagtcgcatttgttggaccaagtggtgctgggaaaacgacgatttgtaatttactgccacgtttttatgacgtttcagatggggaaattactattgatgccgaaaatataaaacatttcactttaccatccttacgagcgcaaatcggcgtagtgcaacaagatgtctttttattttccggtactgttcgtgaaaatatcgcttacggaaaattagatgctagtaatgaagaaattgagcatgtcgtaaaactagcgcatctttctaaagtggtagaagagatgccagacggtctagatacaattattggtgaacgcggggtaaaactttctggcgggcaaaaacaacggttagcaatcgcccgaatgtttctaaaaaacccaccaattttaattttggatgaggcaacttcagccctggatactgaaacagaacaagtaattcaagcttcattagaagaattagcagaaggtcggactactttaataatcgcgcataggcttgctacgattaagcatgctgaccgaattatcgttgtaaatgaaaccggcattgcagaaactggaacacatgatgaactgttagcaaaagaaaacggtgcatataaacgattatatgatgcacaatttaatacgatttaagaaaaagggattccaacttggaatccttttttaaatttgcggacgagtccttttatagagaataaaaatggcaacagttatcaaaatgacgcccatcacggctggagcagcgtgaccaagagtgatataaatttgaccgccgataataggtccaatgatacgcgcgagtgattgaatcgcttggctaccaccttgaattcgcccttgttcactggcgcttgccgatttcgaaaccatgccattgaaagcggggttgaaaatcgaatcaccaaacccaaaaacaaacattccaatgactagcagctgaggaaggataaaaatcgaggaggccgcaataagcgcataaccaataatttcagcaatcatcccgagaatagcaatttgtttatcactaagcctgagcagtagtttaggcataacaaaggcttgtgaaagaatatcttgaacccccataatcgaaaacatcaaaccaattaaagctggtttccaactaaaattatcaatggcaaattgagacataactgcttgaagtgagccatttggaatccaaatcaagaatgccgcaataagtaagcgacctaaatgtttaatcgtcaagatattaaggagttgcgagaaaggattaagtcgtataagcggaattcgttttaagcgattttcctcttttaaagtttcaggcatgtaaaaatagccaaacaccaagttaataaaagtaatagccgccccaaagaaaaacggcatcgcatatccaaaatgggctattacgccgccaaaagcaggaccaagcgccgcacccgcacccgccgcggcactgacccagccaaagtatttcgtacgctgttcttcgggtgtaatgtcagcaaagaaagcgaatagcgtgctaatactaccgccagtgattccttcaattatccgcccaagaaagagtacccaaagcgccccgccaagcccgaaaacaaagtaaccaattgccgaaccgataaaacaaattagtaacaccggacgtctgccgaaccgatcacttaaagctccaagtccaggtgctgcgaagaacacgcaaagggcataaacagatgttaatagcgtcaccataagcgcttgttcactagaattacttacatacggtgcaattagaaaaggaactacaggcataatgatactgaagcccattccacaaagaaaaacagatataagaccaaaaagtaaggtttttgtattaatgaaagatttagttgaagacatgtgattctcctatcgaaatataattagtgtcctaggaaacataaatagcttaactcctttttgtttccttgtcaacaaaaataaaacgataaaaaacagcctaactaataaaagcaagactgttactaagtttattctgatttcctatctaaaatttttttcatttcagcatctaaatgacggctatatttatccacaaattgtaaaacttcctcatattgtttatcagaaacatcttcaaaaacaactttatcccggtcaagaaactcttggtgcaaattatcatgcacttggttgatttctgctcctttggtcgttaatcgaaaatagatttcttttttattttcaggtttttgatagctttcaatatatcctttatccattaattttttagtgattttactaatcgcgctttttgtcatatagaaagcttctgcgagtttagttacgtttgggtcctcatttttagcaataaattcaatgcagtgaacttcggaaggtttgtatccctcaagcgctttttccattttcactttgttaatccatgcgagtttgttaaataaatctctaacgtttgccatgacttgttcgtttttatccatgccatgccctcctaagttatctctctggttgtagtatagttgttttttgtgtccgtttcaactattttttgcctttattcgctaaaataggaagttggaagcgctatttgttaagagtgtgtaaattatccatgttatcaatattatttcactgttaagatttgttatacttaacacatagattgattggaaggggctgaaatgattggagatttaccgcaaaagcgcggcagatacatttaaacaactagaagcaacagaacaaggcttaacaactagtgaggttacaaaacgacaagaaaaatacggttttaacgaactgaagaataaaaagaaagatccactttggaagctttttctcgaaacgtttaaagatccaatggtcatcgttttagtcatagctgccttggtgcagttggttttaggtgaagtagttgaatcacttattatctttttagtacttattgtcaactcaattattagcgtagttcagacgagaaaagcagaaagttcactcgatgctttacgagaaatgtctgcgccagttgccaaagtaattcgcgatggctctaaacaaagcattcatgcgcgcgaactcgtcccaggtgatgtagttattttagatgcaggtgattttgtcccagcagacggccgcttattcgaaagtggttctttaaaaatcgatgaaggcatgctcactggggaatccgaagcagtagaaaaatatattgatactatttctgatgaagtaggccttggtgaccgtgtgaatatggtgttcagtggctccctcgttgtttatggtcgcgggatgtttgtcgtaacaggtacagcaagcgaaacggaaatcggcaaaatcgcaggactacttgaaacagcagaagcaaaacaaacaccactacaacgaaaactagaatcatttagtaaaaaattaggaattggtattttagcactctgtgtacttatttttgcagttgaggctggtcgcgtattactcggcgacaattcagcggatatggcaacagcgattttaaatgcctttatgtttgccgtggccgtagctgtagcagcgattccagaagcactttcttctattgtaacgattgtgcttgcggttggaacaaacaaaatggcgaaacaacatgcgattattagaaagctcccagcagtggaaacactaggctccacaagtgttatttgtacagacaaaacaggtacgttaacccaaaataaaatgacggttgtcgattactttttaccagatggaacaaaggaaaatttcccggatagcccagaaaactggtcagaaggggagcgtcgtttaattcatattgcggtactttgtaatgactcaaatattaacagtgaaggtaaagaactaggcgaccctaccgaagtagcgctaattgcctttagtaataaaaataatcaagactacaatgaaattcgcgaaaaattcatccgtgaaggcgaaattccatttgattcagatcgtaagttaatgtctacgcttcacacctttaatgaaaacaaagcaatgctaacaaaaggcggaccagatgtgatgttcgcgcgctgtagttatgttttccttgatggcgaggaaaagccgatgacagaagagattttaacgaaattaaaagaaacaaatgaagaattttcaaatcaggcactccgggtccttgcttacggctacaaacggatgcctgctgatacaactgaattaaaattagaagacgaacaagacatcgtactagttggtttaactgcaatgattgatccgccgcgtgaagctgtttatgcgtcgattgaagagtcgaaaaaagccggtatccgcaccgtaatgattactggtgaccataaaacaaccgcacaagcaatcggtcgcgatattggtttaatggatgcagacgacatcgctttaactggtcaagaacttgatgctatgccagaagaagaacttgataaaaaactagaacatatcgctgtttacgcccgtgtttctccagaaaataaaatccgtatcgtcaaagcttggcagaaaaaaggtaaaataacggcaatgaccggagacggtgtcaatgatgcgcccgctttaaaacaagccgatattggtgtcgcaatgggtagcggaactgacgttgccaaagactctgccgcgatgattttaaccgatgataatttcgtttcaattgtggatgcagttggcgttggtaggaccgtttttgacaatattaagaaatcaattgcttatctatttgcaggaaacttaggcgcgattatagcaattttattcgcgctagtactggactggattaacccgttcacagcgctacaactactatttatcaacttagtcaatgactccttaccggcaattgcgctaggaatggaaaaagcagaacctgatgtaatgaaacgcaaaccgagagatattaacgaaggtatttttgccggcggaacgatgcgtgcagttattagccgcggtgtattaatcggtattgctgttatcatctcacaatatatcggaatgcaaatttcaccagagatgagtgtcgcgatggcatttactacgcttatcttagcgcgtacattacaaacattcgcagctcgttcgaacgtccaaaccgcatttggcgcaggatttttcagcaacaaatacgtcatcggcgcagtattactttgtttcgtcctatacggaattacagtattaccaggagctcgcgaaatcttctcaatcccagcaacatttggtttacacgaatggtcgattgcagcaggattagcactcgcagcagttgtgatgatggagattataaaagtagttcagaataagttttttaaagaagcgtaaaaaaacagaaatccctttttgaagaggggtttctgtttttatgtcataaaaagctacttattggtaaaaagtatacaatgattgacggtgaaatcgcaagttatcatttcaggatgctatacttataaccaacaaagatttgaaagtaagttttaaataatgaaaaatgatattttttaattctctgctacaaaataaaaaggggcttattttagtgtggaaaatatgttaatcttgataagaaagtaggtaatagataataaaaaatatttgtggctgtaagattacttagctagtatgtgaaaagatggaatataggtgaaaactagttggaaaatacagaaatctaataaagtattacttacttaaataaatttttcaaagacgggggaaaaaaatgtttgagaaaataacaattggtataaaagtgaaaaaaaataatcattttgagcaaatagatgttcattttattaaggataactctattgtaaatgatgcagagtattataatcagggaaatgattatatgaataaaagagatgttataattcaagtaaaaatgaaggaacaaacttttaatgttgaaatcgaatttttaggttatatagttgatgaaattgatggaataagacaagaatttgaaaaagcttataatgaaaaaaaaatcaaaatggagtcaatggatgaagatgaggatgaggacgaatatgacaatatagatagtcgcaatgaaattaagccgtatgaccctaatttaatacgggttgaccagaaacaatttactattgaaaattcagtaagtaaaattggtaataaagaaattgatttgaatcctgattttcaaagaaaatttgtttggacggacattacaagaaagtctagattaattgagtcaattcttttaagaatacctcttcctgttttttatttatcagaagatgaggatggagtttatcatgtgttagatggtctccaaagattaacagttttgaactcatatttaaacaatgaatttagattgaaaaacttagagtatttagaagaagagtgtggaggtcgtttttttgcttctgaggaaaaaaaagcattagataatcctgatcgttttctttctaaaaaatatgttagaagaataaaagatactatgttaaattttaacgtggttgattccagaacacctgatcaggcaaaatatgatatatttcgaagaattaatactggtggaaagcccttgaatcgtcaagaaatgagaaatgcaatggcaacattgccgacgcgtaaattattaggaaagctttcaaatttagaaatatttaaaaaagctactggttattctgttaaagacacaagatttgctgatcaagagttaatacttaggtttgttggattctatttgatagatcaaggttaccgaaattctgtcccatacaaaggtgttatggcaacatttttagatgaggtcatagaggtgctaaataaatattattcatataaagatgaatttatagaaagaatatttaatgattttaaaactgcaatggaaaacgcatatttcatgtttggtgataaagcttttaaacgaacacaagtcattaataaagcattatttttagcagtatccagaaactcatataaattccatttcgataataaactaaatatagggagcaacatcaaaaatagagatgctttttttaataataacaataatgttttttggaattctagaattgaaaattatgaaacaaaaagtgatttgataaatgattcgcttagtacaggtactaatgaagtattaaaaatagaacattcttatactattatgcaagacttaatggaggttttaatgaatgaaacaaatttctagtttagaaattaatggactgaaaagttatacagaaaaaactgagattaaattaagtcaattaaatgtattttcaggagttaactctgttggaaaatcaacagctattcagtcaatatcgttaataaaatcactttatgatagttatattaataagaataagattattagcgaagcgttcttaaataatgagatgtttggtttagaattaggaacatatgaaaagataatcactggaaataataattattttgaaataggaataaataataaattgatacaaatagaagctaaagaaggggatgctctaaaagtacaagcaaatatgaaagaggtaacagaagaaataaaagttaatctatttcatggtcatttttactacttagctgcggaaagatttggtcctagaaactatcaagttatagatagctacggcatagacaattgtggaatcaaaggggaaaatgcatttcatattttaaataaatattcagaaaatattatagctgatgatttattgtttcagggtacagcgaataaagcagaaaaatcgttaaagaaacaaactgaaaagtggctgaatactttttttgatggagttgaatttagttctactttggaaaatgctttaagattggtaaaattagaggtgaaacaaagcaatcaagatatgggatatgtttctttaagtaatgttggctttggtttatcatatgttttaccaatattattaacatgtttaacttctaaagaagattctttgataattatagaaaatcctgaagcacatttgcatcctaaaggacagtctttattaggtcaatttttagctcaggtaagttcaagtaagaggcaagttgttgtggaaactcatagcgaacacattataaatggcatgaggcttttttgtttgaaaaatagtatttctccaaatgaattgacaataaacttcttttctataaaaagctcaaaaacaaatgtaaagaagatatcgttaaatgaaagaatggagcttttggaatggccagatgatttttttgatcaacaagaaaatgatttaaggcatatgagagaaataaggaggaaaaatggatagtatcatttcaaatgagatttttcaaactataaaaagtgaaaatgttcaagaatatttaaatgacattttgattttgatgaatgaggttgataatcataactttaaaatgaaaaaacataaagatatttgggaagttgaaattaatggtgaatttttttatgagtggttatatagtaaaactccagctgagctagtagatttgaaaacagaattttataggcgtatggagagagtaagtgatattgatttagatgagtataaagcttttgagtcttttctaaatgaatctaatcctaagtataaggactatgataatcaatttttatttatcaagaaagataacatcaaagaaatacatgtactatcatctttaaaaagattttattctctaagaagatggtatttggagaaatgtggaaatcaaaaaaatttttataatgatttaccattattattccctaacatttattttcatgagaatgttaaatcaacattaagaaccttgaataatgactttaatttaattcttcccgaaattgtggaacatttatctgctttagaattatttcatcacttgaaattagcgaaagatggagattcaaatattgagaaatgtcaaaagtttgaaaagttttctcaaattagctgtagtcctgaaagtaaaagagcgacagcagaaaaactttcttttaaagatgaccggggagagaaaataaattgtgaatgtcacactaaattcaaaaaaattgcaagagacaaaacaaaacaagataggatttatttttcttttgggcagaaaggttatcaagaagaagcaattattgtttatcatataggaaaacatatttaataaagtagaatattctcactagcactgttagtaagaatatccttagatttcatggggtgttactttttgaataaaatttgtagagttagttcttcatatgaagtctctggttcaacaatattactccaattgactttccgtatctataagcagtaatactgcagaagacctattgaaaaagtatttaattttttgtgaaaagttattgtgctttctaaattataattcaaaaagcagaatatgactcggaatagtaaatatttagctattttctttctatggatttgagtggatattttgaaatacattcataatagcaaaactagatgcttagattattagtcctaaataaagagtataaatccactaaaaaagaaacaaacaaaactctagtacaaccaccaaaccaaaaccccaacagtccaaaccatcgcaagtggcactaaaatccgaaacttcggcttttgcgttttatggtgaaacaactgcatcgacatccaactaccaaaggcaccaccaagaaatgcggagagaagtagtactgattcaggtatccggtatgcgtgtttaattgctttccgtttatcaacagcgaataatagaaaagaaataagcgttatcgcgattaaatatatcgttaaaatcatctggaaatccccctttattgctaaaactaactttattgattagaataaaagcataccacaaaagaaagcagggataaaatggcaaaagaaattattcaaacctcgtcagccccaaaagcactcggaccatattcacaagctgtaaaagtgaatggacttattttcacatcaggtcaacttggtattaacccagcaactggagaattagcagaaggcgcaacaaaacaagctgagcaagcttttaaaaatttagcagccgtactagaagaagcgggttctggactagataaaatcattaaagcgactgttttcttcaaagatttaaatgattttacagctgtgaatgaagtatacgctactttcttttccagcgatttccccgcaagaagtgctttccaagtagccaagttaccgcttgacgctgacattgaaatcgaagttatcgcagaagcataaatattcagaaataaatttgacaatcacgagaagtaaacgatataataagaaccaattacatagtaacttatcaagaaaggtggagggttctggcccagtgaagccttggcaaccggacttttcacggtgccaaatccagcagtatcactgacagataaggcacgcgaaacaggtaaatcactctttcccttaaaagctgtcttttgggggaaagtttttttgtacataaaaataactagaattgaggcgaagaaaatgaatcaagtggcaccattttatgcagatcatgttggaagtattttacggacaaaggcaattaaagaggcacgcgagaaattccaaagtggcgaaattacaactcaagaattacgtgaaattgaaaatgaagaaatcaagtacattgttgaaaaacaaaaagaagtgggtttaaaagcaattactgatggcgaatttcgccgcgcttggtggcattttgatttcttagagaatttggatggggtagaaggatacgatgcggcgggaggcattcaatttagcaaagtccaaacaaaatctcattcggtgaaaattacaggtccaattgatttcacgacgcatccatttatagaagattttattttcctaaaagaagccgttggtgaaaatcatgtagcaaaacaaacgattccaagtccggcgatgcttcattatcgtggtgacatggagtatcagccatatatagacgatgctgataaatttgtggctgatttagcggctgcttatcaaaaagcgattcaagccttttatgatgccggttgtcgttatttacaattagatgatacatcgtggagctatttatgctctgatgaacagcgtgaagtcgtacgtgagcgaggttttgaccccgatacactgcaagaaacatataaaacgcttattaatgaagctatcaagtataaaccagcagatatggttattacgatgcacatttgtcgtgggaatttccgctctacgtggatagcagaaggcggttatggaccagttgcagaaacattatttggcaagctaaatatcgatggtttctttttagaatatgataatgaacgttctggagatttttcaccactaaaatatgtagcgcgcccagatttgaaaatcgttctcggcttaatcacctctaaaacaggggatttagaagatgaaacggcaatcaaagcacgaattaaagaagcgagtgagattgtgccgctaaatcaattatgccttagcccacagtgcggattcgcctctacagaagaaggcaatattttaagtgaagaagagcaatggaacaaattacgttacgtcgtcaaaatcgcagaagacgtttgggggaaataacaaataagaagaactggcctaggctagttcttttttcgtctttacaaaaacagcaagtaggaatagaatagatgttctagaaggaggggaagccctttggatgacaaattacaaaccaaattaaccttattacctgaatcaccaggttgctatatttatagagatgaaaataacgaaatactttatattggcaaatctaaatgtttaaaaaaccgtgtaaagtcttattttcatagtaaacaaatcggtaaaactgcaagacttgtaagacaaattcgtgatttagaactaattatcactacctccgaaaaagaggcactacttctcgagatgattttaattcaaaaatatcaacctcctttcaatatccagttaaaagaaggaacgagttatccctatattaaaatcacgaatgagaaaaatccgcatatcgaagttgtatttgaagtgaaacaagatggcgcgcactacttcggtccatatcctggtcggttttcagcaaggcaaacagtagaacttattgaaaaattatatccgctttgtagatgtgacggaaagccgggacgtccgtgtttgtactatcatttaggactttgcctaggaccttgccaagcagaaattgaacccgctgtatataaaaaacaaattcaaaaaattagtcgttttcttgaaggcgatgttaaaggcgtgaaggggaagctcactaaagacatggaagcagccaccgaaaaactggaattcgaaagagctgctgaactacgcgataaaatccatgctattaatgaaaccatcgaaaaacaacatattattttccccggactaaaaaatcgtgatattatcggctgttatgaacaagataatcatttaagtgttttcgttttctttgtccgaaatggcgcaatcaacggtagtaaatggcatgttttcccaatcgaaaattcgctccaagaagacttagccaattttatcaaccaattttacgaagatccaaataatatccaaccaaaagagttgctaatcgcagaaaaaatcgataaaattactttgaaagagccgctccgtaaggcttcttccttcccgcaaaaaggtggaaagaagaaacagcttaatttagctatcgaaaacgctaagagcacgtatgccgcatatgctaagatgaaagaatacgattttgaaaaccaattgaaaaacagttagaagctagctttcactgattagcttctttgttttgctgtattgaaaatcttatcataaataactatggtcaataatctagccttatggtaaaatcttacgagtacggaaaaaaattaatgctacataaaataattaattatagctaaacacatatagagggaggacacaatatgaagaaattttcacgcttcatactaacaatggcagttgcatgtgttgccatgttcattttcacaggaaacgggttaaatgcaaaagccgcagaagaaacatacttgattggtacagatactacttttgcaccttttgaatttgaaaaagatgggaaacatgtcgggattgacatggacattcttaaagccattgccaaagatcaaaattttaaatatgaaattaaagcaatgggattcaatgcagccgttcaagcacttgaagctaatcaagtagacggtgtaatcgctggaatgagtattacagacgaacggaaacaaaaattcgacttctctgatccgtactttgactctggcgttgttatgggaatcctgaaagataacgacgaaatcaagaattatgatgatttaaaaggtaaaaaagtagccgttaaaacaggtacagaaggttacgctttcgctgaaaaaataaaagataaatatggttttgatattgttgtatttgatgactcagcacaaatgtatgatgatgttaaaacaagaaattcagttgcctgttttgatgattatccagtactcgcttatggcgtgcaaactggaaacggcttaaaaatcgttactgaaaaagaaaaaggaaattcatatggttttgccgttaataaaggccaaaatcaagaactcttaaagaaattcaatgccggtcttgttaatattaaagctagcggcgaatatgataaaatccttgaaacttatttaggaaaagatgctgttaaagaaaatactactgaaaaaggcttcatgggtattattaaatcttcctggccagcacttttagctggaatgtggttgactattcgtctagccgttgtttcattaattattgccttcattattggtattacatttggctttatgaaagtgagcaatagtaaaattctacgtgggattgcaacagtttatgtagatattttccgtggaacaccattaattgttcaagcattcttcttctactttggtattccagcagcgctcgactttaggatgccagtattcttggcaggggtcattgcgctaagtttaaatgccggtgcttatatggtcgaaattgtacgcggcgggattcaatctgtcgacaaaggacaaatggaagcagcaagaagtcttggtttaccacataaaaaagcaatgatgaaagtcgttctaccacaagcaattcggatgatgattccatcctttatcaaccagttcgttatcactttgaaagatacgtcgattatgtcggcaattggactcgtcgaattaacacaatctggtaaaattattatggcgcgtacgtttgaaagtacatggacttggcttatcattggaattatgtacttaatcgtcattaccattttaacgaaagtgtccgatcgtttggaaaggagattacgaaatgactaaacttaaagtaacaggtcttaaaaaaagttttggcgcgaatgaagtgctaaaaggcattgatatagaagtaaaagaaggcgaagtagtttgcgtaattgggccatctggttctggtaaaagtacctttcttcgttgcatgaataacctagaggaaatcacggctggtgaagttgttgtagacgattttaatattacagataaaaaagtagatattaataaagttcgcgaaaacatcggtatggtttttcaacattttaatttattcccgcatctttctgtgttagaaaatattactttagctcctgtagaactgaaaaaaatggataaagaagcagcgaaaagtaacgcgcttcgtttacttgagcaagttgggctaaaagaaaaagcagatgagtttccaaatcaactatctggcggacaaaaacaacgggttgcgattgccagagctcttgcgatggatccagatattatgttgtttgacgaaccaacctccgcacttgaccctgaaatggtcggggaagttcttggagtaatgaaagagctagctaaagatggaatgacaatgatgattgttacccacgaaatgggctttgctcgcgaagttggcgaccgtgttatctttatggatggcggttatatcgtggaagaaggaaagccagctgatatttttgacaaccctacaaacgaaagaacaattagtttcttagacaaagttttataataaaaaagcaatatgcctgtattattcaggcatattgctttttttattggtttgttaaaacgggattttttcgattctttgaaatctgttcgtaagcatatcccatatttagtaaagctatgtccgtattacgtttagagacaaaagttaagctcttaggttgatttgattcagtatcatagccagctgggatagtgagttccggatttccagcgattggagctaggaacttcacagatccgccgacacctgctgatacgatagcgtctaatctttcattttgtaacacagaatccagttcgttttgtgtaatatgaataagttcattagctacgttatccgcttcttgtttcgtcattgtactattctgcgacgctacaagttcactttggccgaacttcatgtttctagtaggattagttttattaaaagcgataatcgattctaatgtcgacataggagaacgattaatttgtaaaaattgattaagatctcgtttgaaatcggcatttaataaagtgatataatcagtatccacttgttctaattcttccaatgtgatgccctctataacggttgcaccagcagttgttaaatcttttttaattttctttaggatggctgtttcttcattgctttcatcatcagacagtagtccaatccgcttattttttagcgcatctttggaaagtggtgtttgacttgcttcatccattaaaacattggttgttaaataagcatctgtaactgttcttgtaagtggaccaggcgtatcaaatctacttgagagtgggataattccctcattgcttacaaggccttgactgggtttaaagccaacaacagattgagctcctgctggtaaaatgatagaaccatttgtttctgttccaatcgcaattgcagcgaaatcacaagtagcagcagttgcagatccagagcttgaaccaagtggatctagttcggaagagtaaggatttttgctacgccctttttttcctgagtagccatttggtactccgtcgtccattgcagctgcccattctgacatattagtttttcctagaattaaagcaccgtttgttttaagtttgtctacgatagccgcgtctttctccattacccaatctttaagggctacagtaccggcacttgttggcagggtaatagtaccaatattatcttttaaaacgacaggcatgccgtataaagctggtttatttggctcgttttgattatcaagttgttctgcttctgcaataatagtaggactaacctctgtgattgcatttaacataattccattttgatcgtgtttttttattcggttgaggtaaattcctgctaattctttataacttagttggttagttgcaattaaattttgaagtttggctatgtcagccccaattacgagatgctctttttcttcaagagccgctatatccaatgattctagttgtgcgtcaattggatccattactcgttctttatcataaaaatttatatcttggattggcgtctcttcggtcggttcttgtttacctggatttactttcccaggttttactttactcggcaaagtgttattcggtgtagtgttattcagcttagaacttcccttttttttcgctgctgctgttttgtcgtttgttaatttaatttcgaaatttttgttttgattaacagattcctgtgaaacttttccagttaatctaccaacttctaatgttttattgccaaaaccagtttctagtttgaagttttctttatttgaaccgatttttttatctttatcatgttgattggaatctttggatttggatgttggcaggtcttttttggaaaggctagaggttctttctggtgcggaagtttgttggcttgttaggtagagataggtaccggttacactaaacgttgtaataactgtggcacatatgatgataattcgtcttttcatgtaattcctccgatgtctgatatatgtatcttattatataggaagtataagagaaaatcagtgacaataatgtgaagataagaattatatttttagacttgatttcatgcataatagcgatatattcacaatctgattacttaaaaatcttttatgttgttttcttttcacaattttgtcacaaaatagcgacttttttccttttagttaacaattattgattattatattttataattgtaagaaaggtttacaaatccacttaggaaactttatgtgaaaaaggcaattattctttatattaatacgatattatccaaaaaaattcggttttcaaacgctttcttgaaaaaagtcacgaatttaggttagtttttagattaatagggtatttttactaaagagaatatggtaaagtaaggaaagagagataatgaaaagaatgaaaactaatttggaagatggagtgatgagtttggataataatcaaaaagatttgaatcaagtaatccgtcagctcaaagaaaaaggtattgtggttgaaaaaaccaaatcccgaaaagatatatggaaatcggtaagcgggaaagcgatgccgaatatgacacttcgattgcaataaaatcgataagtggggactttttatatgttatttgtctgcgttttttgtaagtgaagttacgaaaaacgatagaattcgcatgtaaaattactccactttttttctttgtcataaattagtcattaagttttgatgtttctgttatcctttttaagcgaaaatgttgtatgatggtatggaagacttctgtgaatgaagaaaatagaaatagagtgaggcaaatacatgaaaaaagaagcagttaatcaacaatctatttatgttcatattgatcatgttattaacaatgtggcgacaagcggcatttctttttgtgattttttaaatggcgttgggcaaccgcctgaaaatatattgttaatcaaacataatatggaagatgcgtcttataatgcacacacggcttttcattacttagagccaggcgatttggcaaatatatctaaagaaaatttcagtccactttgttggattgattttgaagatgtggaacttttaaaccaacttacaccgcaagaagtggctgagatgctttatcttgcgcatacgggacgccaccttcgttctcctttttactataaattacaaaataattttgtttatttaacgagagaagacggtcgctacaataaagtatattatcgaaatttaaatcatttttatatgttgctaagttatgtcattgcccggaaaacatcggaactcgttaatgagaaaggcattttttcgtttggaaagaaaaaatatgtttctgaaccaccagttgagctactcaaaaaaatgtccgatcatttcaaagacggtgcttgtatagcaatggatgatgtcgttagaactagaacccaaatcgaagtaccaattggccttggtcttacggaagaaatgactgaactagaaataacttcaaaaatttactacgaagaagaagtcgcaaaactagtctatgatttaaaacaaaatgaatggaaatatatcgaaaaataaaaaatcaaaccttttcctttacgtttggttttttatttgatagaatttaactaatgaacgttagttaggaggattattctaatgacgaaaaaacttatcaaagaagtagcattaaccctttttgcagaaaaaggatatgatggaacggctctttctgaaattgcaaaagctgtagggattaaaacgccatcgttgtatgcccactttccatctaaagaagcgctttttatggaagtgtatcaagatagcatccacacagaactaagcgaattaagtaaagtagctgatgaagaagcgctaggaggagaagaaaaactgcggacaatcttttttgttgcgactgatttttcaagaagtcctgatgagaaaaagtttttccaacgagcagtattttatccaccaaagtctctttttgaagagttaaaagaagagacgagaacttatgagcagttaacgaatgatattttacgaaaaacgcttgagccggcgctccctgaagatgctttaacaagatggatgcatgtgttctatgcgttactcgatgggcttagcgtcgagcacgggatctatgatgaaacggaatttgagttgcgtaggaaatccgcttgggaagttctcgcaagtttactcggataaattggaggtaaggaaaatggcttggttttatttaataatggcaggattatcagaaattgtttgggcttttgggctgaaagaatcgcacggctttacgatgttagggtggagccttttaacgatagcgtttctaatagttagtttcggtttgttttcgatttccatgaagtcgattccaattgggacggcgtatgcagtgtttaccggaattggggctgctggtacggcgattattggaatgatttttctttcagaaggcgtttctttttggaaaattatttccctaatcgtacttttaacaggaattattggccttaagttagtggatggcaatgagtctgagaaggaggctaaataacgatggattggatatttttactcgtagcaggtttgtgtgaaatggtctttgttgtcatgctgaaattatcagacggatttaaacgtctcggatttgcgatactcaccgttatctttatgtcagcgagcttcttcttattatctctcgcacttaaaacaattccgattggtacgggttatgcgatttggaccggaattggggctgttggtagtgtcacactcggaatgattgtctttaaagagcgtaagagtgttgggaaactgctcttcattacgatgattattgcaggcgttgtcggtctgaaattaacatctggtgtttaaataaaataggttgaaaaagatctttttggaataggagcacgtcattcttattcgaaaatgaagattttttcaacctattttttagttatgtcttttcatcttgctaaaacatggtaaaatagataaagcgaataatgacggaggggtattatgaaaaccaagttaattttattatacggtggaaaatctgctgaacacgaggtttctttacaaacagcattttcagtaatcaatgctttagatttagaaaaatttgaagctgaaccaatatatattacaaatgaaggtgagtgggttcaaggaccgctactttctggaaaattagattttgtcgagcaattacgtttctcggctacagatagagtgaaacttgctacagctgaatcagaaaaatcagaaggggaagcaattagcccagctgttttagaagctgacggacaagaaacagttgtattcccacttttacatggtccaaacggagaagatggaactgttcaaggcttattcgaagttttaaatattccttacgttggcaatggtgtcctagcttcatcagcagcaatggataaaatcgtgatgaagaaaatttttgcagatgctggtattccacaagttccagcagttgcggtgcgtttaattgattggaaaaactatcaagaggaaatggttactgaaatggaagaagtgcttacatatccagtcttcgtaaaaccagcgaatcttggttcaagtgttggtattagtaaagcaacgaataaaacagaattaattgaagcgatgacagaagcatttttatacgaccgtcgtgttgttgttgaacaaggtgtggttgctcgtgagatcgaaatgggcgtgcttggaaatgatacgccagtttgctcagttccaggagaaatcttgccagaaggtgcagttgctaagttttatgattacaaagcaaaatatcaagacaacaacactgcattaattattccaacagaagtagaaccggaaattttagaacaaatgaaagaatatgcagttcaagctttcttaggtcttgatgcaagcgggctcgtgcgtgctgactttttcttaacggaagataatcagttgttcttaaatgaagtaaatacaatgcctggtttcacaccatatagcatgtatccactactttggcaggaaactggcttaccatacggagcgctaattgaacgattagttgatttggcaaaagaacgccacgcagctaaaaatgcacttaaatataaattagaagactaaaataaacaagaaagcagttttcagatgcggaagctgcttttttatggaagagagcgatttaatttgaaaaaaacagtaggcgaagtagtagcaatgttagatagttccatccatgtagatacatttcgcgatgtcgtcattactggcatttgttttgacacaaggcaaataaagtcaggagatttatttgttccgtttgtagggaatttacgcgatggacacgaattcgtaagtcaagcacgagaaatgggagcagtggcgactttttggcaaaaagatgtacccaatccaccaactgatttcccggttattttagtggaaaatactttgctagcacttcaagagctggcagcgaaatatattcagcaagtaaaacctaaagtaattgcaatcactggcagcaatgggaaaacgaccacaaaagatattatggcagcaattgttgaaacgacttataaagtgcactatacgggcgggaattttaataatcatattggtttaccttatactattttaacgatgccggaagatacagaagtggctgtacttgaaatggggatgaatcatcgtcatgaaatcgaagtgctgtcaaaaattgcaaaacctgatattgcgattattactaatatcggcgaggctcatattgaataccttggttcgcgtgaagaaattgccaaagcaaaactcgaaattacagcaggcctaaatccaagcggtattttaatttatccacatgaagaaaaccttcttttaggaaacgtagatggcgattttagacaactaacttttggtaaatcagatgcagcggaaatttatccgttagaaattcgcgctgaagcagaagggacctcttttataacaaactgggagccagatttagaaatttttgttccgattattggcgagcataatgttttcaatacaatggcggcgatgcttgcggcaagagaaattggtattgaaggcgaaaaaatacaatcagcacttaaaaatatggaacgttctaaaagtcgtttagaatggataacgaccaaaagcggcgcacgtattttaaatgatgcttacaattccagcccaacagcgttaaaaacagttttaaaaacttttatgcatatggactcaaaaggtaaaccaaaatatttagtacttgcagatatgcttgaattaggcgatttgtcgacaaaactacatcaagaatctgctgaagtactagaaaatgatacgattgagaagattttcttatacggtgaagcgatgaaagctttcaaatcagtggctgaggcaaaaattggtcagggaaaagttcaacattttgacacaaaggaatcgcttgagacggcgcttctttcagaaataaatggaaatgaatggatactggtcaaaggttcttacggaatgggcttgaaagatgtggtagaaaatcttattattaagtaacgaataaaattggacatatgatattaccgattaattggtaataatttggacaggaggaaaggcataatggttgcttgtttgtgtattcatggttttactggttcgccgtccgaggtgaagccgctcgctgactatttgcgagagcatacagattgggatgttttagcacccacattacctggccatgatcacctgcgccacttaaaaaatgtgacgtataaagattggattgtttttgtagatagcattttaagtcaaatgttaaaagaagacgatgaagtatatattattggtttttctatgggcggtttgctcgcaggatggcttgctaggcattatccggaagtgaaaaagctggtacttctaagcacagctgtaaatgcgatggaatggccacaaattatcgaaaattccaagcaagtaattaccgaagcaaaagaagtcacgcttaaaaacagcccgatgttcaaacgctatcaaaagaaagtaactgaaaccccgtggacatccacgcttcaatttaaaaaaatggtcgctcttgcaaaaccagtatttgaacatattgaaattccaacttttattgcacaaggcagtgccgatcctattgttcctgctgaaaaaagtgtcaattttttaatggaaagtattccaggaccgaaagaattatttattctagaaggttcaaaacatgtgatttgtcaggatgaacaagcagataaattatttgcagctgttttaacatttttacaaaaagatgtagctgtactaaatgcaaattaaaaaaaccgattcagctctcagttgctgaatcggtttttttgttttcgccaacagaatctcgggctattaaattagtcgcaagtgccagatgaacaaagccttcatctggttttcttacgcgattatacataagttccactgctttttcgcccataaacgaaagattggtacacattgtcgtaagtgggggattgctaagtaccgtaaattcggtgttatcaaaacaaataatcgataagtctttcggaatattatatccttttgattgcaaataagtatttaaaataaatccaagacctgaattaacgcaaaaccaagcagttggaagttcatctagctcgtctaacgtccggtatagtgtcgtttgttcttctttaattcgtgtaatggcatatttttcattaaaaggaatctgatgatactgcaatgcttttttgtatccttcaaagcgttcctcataacttggagaaaaagtagtatcaccaagaaaaccgattttttgatgtttattttcgattaaaaattcgactgccgtgaaagcaccgtctttattttggctaataacggcatcggcttttaaatgtggatcgtgatgatcaattagtaccactggcataccaagttcaatcactttcttactgtaagctgtattaatatgcgatagcaagaaaatccctgtccagttttccgttgttagttgctcaggaagttgattcttttctgcctcctcatcagtcactggaaaaataattaattccgcttggtgagcaatgatgctttgtttcatattatcaataatttcgccaaaaaaactacgttgtgataaggcgaatgaagttgctaaaagtgcgaatttttctttcacgacttctcgtgcgatttcttttttatatttataacctaattcatcagccattttaaaaacagccaatttagtttgctcgctgaccccgtttttattacctaaagcttgtgaaactgaatttttcgttatatttagcctgtcagcaatatcttgcattgtaactttcttcatgcttccccctccgttttcctctgtttattctattatagaagttaattcacaaaatagcaaaaattttataattaaaaagtaatgttaaaagtaatttttatgatttttgatagtaaatgcttaaaacgtttataataaaagaatttataaaagtaattattgacattacaaaaatgtaatgtgataatgtaatcgtaatcaagcgcttacaattacaaaaagtggaattaggaggattattgatatgaagattagaaaaattgctattgcggctcttagtgttgcggttgctggctcattactaactgcttgtggcggtggaggaaacaaaagtggagacgataacggtaaaacaaaagtaacgttttgggcagctccaaatccaactcaagtaaaatattgggatgaaatggcaaaagcatatgaaaaagaaaacccagatgtaacggttgaagtttcccaaatgaaagaaagcccatcatcagaagcgacaattcaatcagctatcgcctctaaaacggcaccaactatgtctgaaaatatcaatcgtagtttcgctgcacaattagcagatagtaaagctattgtacctttgaacgatgtaaaaggtctcgatgatgttgtaaaagaaagaaaaatgagcgaaacaatggattcttggaaattctctgatggcaatcaatatgtgctacctgtatactccaatccaattctttttgcttggcgtttagatacattaaaagaacttggctatgatgctccaccaaaaacatatagtgaagcacttgaagttggtaaaaaattaaaagcgaaatatccagataaagtactttgggctaaaggtgatttatctgacccaacagcatggatgcgctggtttgatttcttcccactgtatgatgcagcttcaaaaggaaatgcatttgttgaagatggcaaattagttgcagacgataaagctggaacagaactgttaaccttcatgtccgaattgcaaaaaaataaattactccttgcaagtaaagcaacagatccatttgaaacaggaacaagtatcatggcagacaacggcccgtggactttccctaactgggatgaaaaattcccagaacttaaatataacgaaaactacgcaataactgcaccacttgtaccagacagcatggcaaatgagaaaaatattgctacttatgctgattcaaaaggggttgtaatgtacgctcaagcaacagataaagaaaaagaagcggcaatggacttcttgaaattcgtttataacgacgataaaaatgatttgaaattccttgaaactactaatttaattccagcacgtgacgatgcaactgaaaatgaagctttcacagcattctttaaagaaaatccagaattagaagtatatgcagcaaatgtgccgtatagcattccagcgatggatgatgcgaaatacaatgatattcaacaagttcttggagaagaagcttggaatccaattgtacgcggggagaaaaaacctgataaagcttggtctgacatgaagaaagcggaggacggggtgcttcaaaaatgaagcggcgaaataacaaattgggctggtcatttaccagcccgtatctcatattcacagcggtatttttcttagtaccgctaatttggtcaatttggttgtcggtgaccgattggaacatgatgagtccggaaatcaattttgttggtttggaaaattttattaaagcttttactagtccggcagttcgagcagccttttttgtcacttataaatttttaattgtgtttgttccgatggcgttaattatttcgatgattgtcgcagtacttgtaaacggactaccgaagtttaaaggactatatttagtggcgtttttcctaccatacttgtcctcaggtgttgttacttcactaattgtgcaaggtttactttcgtataacagtgctctaaatgtgtttttacgtgggcattttggttgggatattgattggcttgggacgccgatgtcggcacttgtcattatttcgctaatgattgcatggaaaatgtctggttattatgcgcttattttaatttctggactcgctagtattaaccatgaaatttatgaagcagcagcaatggacggctctggtcgctttagaaccttttggaaagttaccgttccgatgctctatccagctttatttaccgtgattgttttagcggtaggtgttagttttgggattttcaccgaagtataccaactaactggcggtggcccaaattttgcaacgaacacatggcaaatggagattttcaaccaagcattcgttaacttgaattctggttatgcttcagcgatttctcttatggctgctactgtaacgttcgcatcaattggagttattaagaaaatgcttgagaaatggggtcaaagaaatggttggacataatagtaaagcgggaaaaattgttcgctatatactgacaacattgctcatgttagttatgatttatccgtttatttatctcgtattaaattcatttgcagcttgggatcaagtagataaaaagctcattccgactgaatttaccactcgttcttgggattggctgtttgggaattcagtggttgcggcgcctgctccgtggattcacgcctttattaataccattattgtttccacgattgcgacagggttaatgttactttttggcttaatggtcggctatgcactcgcaaaagttgattttaagggtaaaaaaattgttaataatgcgattttattccaaatgtttttcccggcgattattttgctgattccgcaatttttaatgattacggactttgggttacttgatacgtacgctggaatgattattccgaccatgcttagtttatgggccgtatttatgtataccaacttttttaaagcgattccagatactttaattgaagcagcaaaattggatggtgcgagtgatttgaaaattctatttcgggttgtacttccgatgtccaaatcaatcactacagttatctttttattcctgttcacagacagatggacgaatttactttgggatatgcttgtaacgaagagtgatggaacggtaacgctgaatgtactaatttcgcaaatgttcggaccgtatgcaacttatccaggtccaatgtatgcagcttctgtactactcacattgccactaattattctatttttattcttctcaaagaaattccaagaaggaatgcaatttactttgaaataaaaggagcgactgaacttggaattttggcgaggtagtgttttttatgaaatttatatgaaatcatttcaagatagtaatggtgatggtttaggtgattttaaaggattgactagtagattagattatttggtagatttaggggttgatggcatttggctcactccattttatccttcaccacaagtggataatggctacgatgtttcggattactgtgatataaatccagattacggtaatatggctgattttcgagaatttatgaaagcagcagacgcgcgaggcataaaagtgattattgacttagttttaaatcattcttcgacggagcacgcgtggtttaaggagtcgcggagtagcaaaacaaatcctaaacgagattattatatttggcgtgaaaaaccaaataattgggagtcgttttttggtggctcagcttgggagcttgataaacttactggtgaatattattatcacagttttgcaaaggaacaagctgatcttaactgggcgaatccggctgttcgcgctgaaatcgagcaagttttagcattttggttaaatgaaggcgtggcaggattcaggttagacgtgattaataatttaacgctagtacttgagttcccagataatccagttgtagataatgaaatggagcatgtttatgatcgaaatcaacaaggactcgaacaagctttagagcagattgctgctttttgtcgcaaagagcgagaggtatttttagtaggtgaaattagttctgataaattgccagaaattgcgaaatatagttcgaaaacaatgcttgatgtgacctttaattttaattttggaagtgtcgaactgcttgatgcgcaatcggtatttactactttaaatgaaatggaaacggcattacaagaagggcaatggccaacgcttttctttggtagccacgatatgagtcgatttacaacacgactttcaaacggaaacttgtccaaaacgaaactgttagcgtttttaatgttaactgctaaagggataccgtttatttattatggtgaggaagtggggatgccagatttaaccttttcctccgtggaagaaatgcgtgatattcaaggaactgcagcttattatcaagcgttacaagctggttcagatgaacaaagtgcacttgagctcgcgataaataaaacgcgcgataaagcacgcggcccgatggtatttccagatgggaagccatttacgaccggtcaaccctggattaaaatggctagtttaaatgaggaagatgcattatcaatgtggcatttttaccaagctttactcgcttttcgaaaaggtcatgattttaaagaaaaagaatacgcgtcattaacgttagatggtgaaacacttagctatcagcgcggggaattcttatttttactgcattttggtgagacagaggtgacatatccacttcaagagaaatcagagcttgtttttggagatgcggaaatgttagaagctgacgttaagatgggagcgtatgctggtattgcgctcagagtggaggattaatatgaaatcaattgaaacattattgcaagtttatcgagaaacaaagactgcttctcacacccgtcttgagttaattggtgcttttgacaaggatgtctataacattactgcaccttttacttggtttggaaaagaatatattgctgggcgagtggaagcacgggatagtgagtttgcagaagtgcgcttttttgaaaatacggcaaaggatacgtatcaattagttgaaaatacgactatcctagccctgcaagatccatttgtaacgtttgtacaaggagaacttattatcggtggcgtggaagtttttcctaaagaatcggacagggcaatgttagattggcgcactaatttatatcgcgcaacttcgcttaccgactttgagcaaatctttacaggtccaattggaatgaaagatttacgagtgaaagagctaacagacggccggattttagtactaacaagaccacaaggcgaaaaaggcggtcgcgggaaaattggcgcaatcgtcattaattcactagcggatttaacaatcgaacaaattgaaaaagcgccccttttaaaacgaaatttttcaggtgatgaatggggcggcggcaatgagattcatttgctcgaagatggtcgaattggcgttcttggtcatattgcttgttttgatgaagctggtgatcgtcattattacgcgtgctctttttgtttaaatgaagattttacacaaatcgaacaagaaaaaattattgcagaacgtgctgattttgctccaagtgagccgaaaagacctgatttagcagatgttgtatttagcggcggtttaatcagaaattcagacggtactgctgaactttatgcagggattggcgattctgatgcacaaaaattaaccattcctgatccatttaaaaataactaatagtaggagttttgaatagaaatgaacatttatcgttatgaagaaaatccattaattacacctttagacgtgaaaccaatccatgaaggttttgaagtgattggcgctttcaacggcggtgtggccgagtataatggcgaagtgcttttacttcttcgtgtggcagaaaaaccagttagtgaagacccagaaatagttcttgcaccagtttataatgcgaaaaacaaagaattagaattacaatctttccgtttagatgatgaaaattatgattttgaagatccgcgaatgattcgcagtaaagcaaaactagaaggattttcttatttaacttctctttcttatattcgaatcgctcgcagtaaagatggtcatcattttaccttagatgaaaagccgtttttatacccatttaatgaatatcagacatttgggattgaagatgctcgcgtgacacaaattggagatacttatcatgtgaatttcagtgcggtatctgagttcggtgtagcagatgcattagttacaacaaaagactttgaaaatttggagtatcaaggcaatatttttgctcctgaaaataaagatgtacttattttcccagaaaaaattaacgggaaatattatgcactgcatcgcccaagtttaaaaagtatcggtaacttagatatttggattgcttcttcaccggatttgcgtagttttggagatcatcgtcatttacttggtatccgtcctggtgaatatgacagtggtcgcgttggtggcggttgtgtgccaatcaaaacagaagaaggctggttgattttatatcacggtgcaactgaagagaatcgttacgtgatgggcgcggcattgcttgatttaaatgacccaacaattgtactgaaaagaacgaaaaccccgattttagaaccagtagctgattatgaaaaaaatggtttctttggcgatgttgtttttgcttgtggagccattcaagaaggcgacacgttacacatgtattacggggtagcggatacttccatggcaggttgcgatatgaaaatcagtgaaattttacatcagttagaagtggaagctaaatgacttggcaaaactatttgaatgcttggaaaaatgccgatttatctgatgagtggcgcagtgaattaaaacgagtggaacatgaacaggagcgttttgaaggatacttaacatttggaacaggcggaatgcgtggcaaaatggggcttggctcgaatcgcattaacctttttacaatcagacgggtggcaagtggattaggcgagtatgtggcagcaaatggaggcaaagagaagggcgtcgcaattttttacgattctagaaataattcagacgtttttgcagctgaaacagcaaaagtattatcagcactgggcattcgagtttatttatcagatacgattcgcccaacaccagcactttctttttgcgttagagaaacgaaatcctttgccggagtagtgattaccgcgagccataatccttctatttataatggatttaaagtgtatgatgaaaatggatgccaaatcacattaggtgcggcacaggaaattaccagctatttaaataaaataacggatatttttcgtataccagttcgagaattaccaaatttgctcgttactaccattggaaaagaaatggacgacgcctatttacaggctttaacaaaagtaatttctcgtccggaattggttgctgattatggaaatgaattagggatttgctatacaccacttcacggagctggtaaagaactagttatgcgaggcttagcggaaaatggcttttcaaatacgctacttgttcaagaacaaagtgagccagacggagatttcccaacggttgtttcacctaatccagaagaagaaaatagttttgaattagccaaactgcaagcgcaaaaaatgcaagcggatataattttggcaactgatcccgatgctgacagactcggagtagcagttttaaccaatcaaaacgagtatcaaattttaacaggaaatcagcttggtgctttgttattagactatattttgtcggcgaaagagtttgtaacgaaagaggatacgatgattaatacgattgtcaccggagatttaggtggcaaaatagcaagtcgatttggtattcttcatgtccaaacgctcacaggtttcaaatttattggtgaaaaaatagccgaaatggaagggacgcaagctaattttatttttggctacgaggagagttacggttacttaatagcgccttttgtacgcgataaagatgcggtacaagcagcattacttacagcagaaatggctcttttctataaaaaagaaggaactaccctgcttggaaaactaacttctttatatgaacaatttggctatcataaagaatatttgcacactattaccctcgaaaacaacgatggcgctgcaaaaatgaatcaaatgatagacactttacgaaaagaaccccattttttaccagaaatagtagctgttgaagattttctcactagcgagcgaacaaatcttctcacaaaagaaataacaaacatcgagctacctcaagaaaatgtattaaaattttacttaaaagacaaatcatggttcgctgtccgaccttctgggactgaaccaaaatgtaaaatctatttccaaaccattgctgaaacagaagaaaacgcagaaaaagcaatgaatgacttaaaagaacgcgtattagctgtatgggactaataaaaagctggaaatcgttttcggatgatttccagcttttttaaaattaaaaataactaaaaacagctgataaacgtacatttaaaacgaaataactttttttattcgataatagcatggaaagataaggttttgacattgaaaagaaattgttattgtgttatgatgttagatggaagtttattaggtttatatttagcctagtgattaatgagggcttttttatttgatgcgttagaactgctataatggcagagaaattttctgatgccgtgaatcattttgcttggtgcgcccaggcttttctattgcagaaaaatgaaaatgaaagatagcagttttcataaaaacaactgcaaatgaacagacaaacaatcgtaataagcgtattgtgatgaattataaaagtagctctcctaccaaactttaaacaggtaaaggagaaatgacattgacaaaattttcggagttcggactggacgaaaaaattgtaaaatcagtaaatcggatggggtttgaagaagcaacgccaatccaagaaaaaacaattccactaggactagcaggtaaagacttaatcggacaagcacaaacaggtactggtaaaacagccgcttttggtcttccaatgatccacaaaatcgaccaaaagagcaacaacgtacaagctttaattattgctccaacgcgtgaacttgcaatccaagtttcagaagagctttataaacttagctatgacaaacatgtacgtgtgctagcggtttacggtggtagtgatattagccgtcaaatccgttcacttaagaaaaacccacaaatcgtagttggtacgccaggacgtattttggatcatattaaccgtcgcacactcaaactagaccacgtggaaacacttgtactagatgaagcagacgaaatgctaaacatgggcttcattgatgatattgaaactatcttaaaagaagtaccagcagaacgtcaaacattactattttctgcaacaatgcctgatccgattcgccgtattggtgaacgtttcatgcacagcccagaacttattcgtattaaagcgaaagaaatgactgcactattaatcgaacaattcttcgtaaaagtgcacgaaaaagaaaaatttgacgtattatctcgtttattagacgttcaagcaccagaactagcaattgtttttggtcgtacgaaacgtcgtgtagacgaactatctcgcgcgcttgatatgcgtggttacgtggctgaaggtatccacggtgacttaacgcaagcaaaacgtatgagcgtactacgcaaatttaaagaaggaaaaattgatgttctagttgcaacagacgtagcagcacgtggacttgatatttccggcgtaacacatgtatataactatgatattccacaagatccagaaagctatgttcaccgtatcggtcgtactggtcgtgctggtaaagaaggtatggcgattactttcgtacaacctcgtgaaatgggttatctacgtattgttgaagaaactacgaaaaaacgtatgcaaccacttcaagctcctacttgggacgaagcatttgcaggccaattacgcgtagcaactgaaaaaattcaagaagcaattacagaagaaaacttagctgactataaaacgtttgctaacgaacttcttgaaaaatacgatgcaactgacatcgcagcagcaatgcttaaaatgttagcgaaagagccagacaaaactcctgtccatattactgaagagcgtccattaccatcccgtggtggcggtggctacaaaggtaaaaatggtaaaggcggtaaaggtggcggctatcgcggcggaagcggtaaaggcggaagctaccgcgatcgtaacaacagcggcaaaggtcgtcgtagcggcggcggaagcggttctggcggtggcggaaatcgtgatcgtcgtggtggcggagaacaacgcagcggcggcaacaaaggcaactactcacaaaaatctaaataagattattagacaaatagttaccatatagatagactggagataaagaagtttttacctttatctccagtctatttttttataaatactaatgttagggaacgggtgtgtggcgctcgtcatgaagataaacaaaattatcgaatatattgtagtagcaatcatcgttctagtgtggacttacttcattgtcattaaagaaattcttcctaaaaatataggatttatttcattagtaattctatcaatagttctttattttataggtaaaaggttgaatgggaaacatagcagataaaaaacggctatactctaagtagccgttttttttatgtgcaataattcatttacattaacttccaaatatgagaaaatagcatgttggcaaaattgccacacgtggttcattcataccatcccacgtaaaaaaactaggaggaaaaataatgaaaatgaaaattttgacggtgaatgcaattatcgccgcactgtatgtagtgctcgggatgattgtcgcaccaattgggtttatggcattacaatttagaataccagaaatctttaaccacctaatcgtctttaataaaaaatacttttggggtattatcgtaggtgtttttattacgaatttattcttttctggattagggtggattgatttagtttttggcgtagcacaatcggctatttcccttttactaatgattggaatttctaaatacgttaaaggaattattccgcggatgattattaatacgattcttttctcgctaacgatggcaattatcgcttgggagttagtaattgtttttgacttaccgttcctaattacttgggcaacaacagccgcaagtgagtttattgtaatgggtgtcgggattccgctaatgtatctattaaataaacgtttaaatttccgaaaaatgattgattaaatgagagagtctaagggaacttaggctctttttatttttgtaaaaagcgggctgcctcctgtatcaattcaactaattggtcattcgtatagtctttattcgattgttgaatttctgctgctaaacttaaaatcatcctagcaaaacaattaggcataaatttactatctgaaaaggaaacttcttttaacaaactaattcgaagtatttctccagacactacatcaataaaaatattttctgcccggctccaaaaaatcacttgaaataaaagcgggtttttttgaatagttcggaggattaagcgttggatattttcttttgttaaaataatttggtcgaattccaaagagaagtactgcatggttcgcaaaatctggacttcaatcacttgaataatctccttatgatgacgataaaaagtggctcgtgatactcgcgcttgttcgcataaatcttttatagatattgattcaaatgttctatcttccacataaaacctctccaaaacagtatatagtttggtttgtgttttttgtgtacgtaaatcaacattcaacggttgatgcacttttacgtagttattcataaaactctcctttttatgatacataattgttattagtgtatcgaaatgtggctattttagcaacttaaaaaggggtattgtttacttaaggaggaatgaacatgaaaattataacaatagaagaacattttgaatccgaagtcattacgaatgaaatcaacaaagtcactggaaatttagtaagtggacaggttagtccggaaatgtttcaatatatgcaaaaggaacttccttcagcaatggaaatgcaagatacagaaaaacgtttagcatttatggatcaacatggtattgatatgcaagtactctcttatgggaatagttctccgcaaaacttaggtccaaaaatttcggtagctctgtgtaagcgagcaaatgatgaactagcgaaggtgattcaacaaaatcctacccgatttgctggttttgctgtcttaccagtaggctcaccagaagatgctgctattgaattaaaaagagccgtagaagaacttggtttcaaaggtgcacttgtaaaagggcagtttgaaaataaatattttgataatagcttttattatccgattttcgaaatggcggaaaaactagatgtaccgatttcgtttcatccatcgtttatcccagaacctattacagaacaatattttgccagtgatgcttggtctgatgtggtgaccggggtattttcatctgctggttttggctggcatatggatgttggtattcaagtcgtgcggatgattctttcaggtatatttgataaattaccgaatttaaaaatcattacagggcatttaggggaaatggtgccaatgtttttaaacagaatggacgatacactcggccactggacaacgttagaacggaaaatctctgactactaccggacaaatgtgtatgtgacaccaagcggtttattgtataaaaacgaatggaaatttttattaaatgaattagatgaaaatcatcttatttatgcgctagattatccttttgtaaaaacagaaaatgctgggactttcctagatacgcttgatttaacggatgaagtaaaagcaaaaatcgctcacgaaaatgctgaaaaattattacatttataaaaggtggaattcaaaaatgactttatcaaaagaacaaatcaaagcaacaaaaagtgagtttgcagagaatttgacgcttgcgaatttaacgattgccgaagtagcgaaagaactaaatacaagtgaagtaaaaatagaacggattttgaatttaaagcagcgttctttaaatgatggttggatattgcgaaattacttacttagaaaggtagcggaagtagggaagacaccagttccatttacagcgctcagtggggattatcatgggtattggtttttagatggagaagaaattgattctggggtgttaagtgaaggagcttgttaaataatgcatttttaaagaaaaaaattcatttggagaaggtatgtttgcatcaattgaagaataagaaataagtataaaaagttagaaggtacaggtattaatgtactttctaactttttttagtttaaataatgactactattaatagcaaatatattttcgcagagaaacactagtgttaccataatactatagtgattattgaataataaaatcaaattaatctaggatttcctcaacgtaaatctgggaaatattctttttcaaattgtaatagaatagcttctttatcgatagtaaggagaatatttttcgccttagttattaagctataatcattagtgttaacaccttgtaaataatatgcgctagctaataaatcaaagcggttaatttctttagcaataataatagcagcgtttaaactacttgttgtaatggtagaattatgttgcataaaaatagtggcagtattgataagcagagctaattttagcggatttaaagatttatctaaagcattatatttatcaatcattgttaataatcgggggacaaatttttcgattacatccagcgggaaataaaatagaatattacacacgaggcgtatctcaatcagtgagaaattatcaattttttctaatcgcttccagattggcttaacaagcttttgtgctttttcaacttcattgtttgttaaaagaagtgatgcctttaacacgattctaatatcttctaataaattgtctttaaaatgattatctaaataattatcgcatctatttataattttcaatattagttctgtttgtgtattagaaacgagtttgaaaaagtctgcaataatatcttctcgagtgtttaatttataatcatttttaatataccgaagttcatctatggttacatctaatttaatgacgatattctctattgtagtgatggttggtataatattgttattttcgattttcgagatagtagtgcgagcaagaatgttattagatacatacgattgagaaagtgatttattttttctgatttgacgaatagcagctccatatgtttttataatagctctcctccaatgtagtaaaataattataatgttttttgggggtgaatatagtgaacataaaactgaaattatgtattttcattgtaacatagtgaatatacaaataatagaatttgtgaaaggggtatcaaattatgatgcaaatgattaattggttttttggttcatcaaattatttaagatagttttagtcaatttaaataatactaagaaaggaaactaatttagccagaagatagaaatatttagttcgctttgatgcgagaataatattttgattaatctgaaaataaagaattcatgtaaggtggtgattaaaatataagttagtattagaaagaagtatatgaactttatgcaatatggcgctgaagtatatattgttgaagattatataaacaagtggggtgcttgtttggtttatacttttaaaatttaggaggaaattaaatgatgaaaaaaattgtaattgcgattgctataatctttggtgtactaggagcaagtggcgctacagagcaaagtgtagaagccgcttcaacatataatgcgacaggaatgtataacggattgctcaaggcggagttaagcttaaattatggatcatggtcttcagcagctaggtataccggaaccaagccgtataatcttcctagaatagctatccaaactcgaattcaaagaaaagatggtgtagtaaggacatattgggaagaaacaagtaataattatgtgaaatatgatggtggatctaatacagttggtccaaatggaaataattatgctcgtgcatatggatattattatggtggtggtgaaactcgagtagccactagatggatgtaatacattaactttaacaagcaccccaaatataggaggaacttcaatgtctgtattaatgtgttgtgaaaatgtatctaaaacttattcaggaaatttacagcctacattagttaatattaatttaacaattaaaaaaaataatttatattttataaaaggaccatctggaagtggaaaaacaacattacttaatatactgagtcttatagatgcacactcttctggaataatgaagttcaataattttgatattagttctatgaatacaaaagcaaaaaaccaaatacttttaaatgacataggaatgatttttcagaaatacaatctattatcaccgttaaatgtgattgagaatatcatgatatccagactatatgcagatttttctaaaaaagattgtattataagtaaagcaaagcaagtgataaagttattacatttagaaggtttagaggaacgaaaaatcaatcaactatctggtggacaacaacaacgtgtggcaatagctcgagttttaatgcaagagccagaactcttgctagccgatgaaccgacagcaaatgttgacaaggaaacagaagcaatcataatggatatttttagtcagtatcgagaaaagggagcgttaataatagtttctcataatgatagttatgctgatattgtggatgcatcctacgagttaaataaaggtaggatatcgagctatgaataataacaaattcgttttttggaatttttggaaaaattataaaaaaactagtaagcaatggttgtcaacgggagttgttactttttgcgggcttttactaataaacgtgactattttaattgtttttattggaaatacatatattaatgtaaattttactgaaaataattctctaaaatggatagaggttcagagtgatgggccttcgattccattaagacaaatatcaagaaatagagataatacgattacactattaccaaagtatgaaccctttatgagtggtgtaacgttcgaaaattatgatgaaaaaggaaatgttaaaatgtctatggatgttaatagtatttttgttccttatgaatctcttgaattttttggcataaacataaaagatattgataaaatacagtgggatgagggaaaagtaattttagtttccccaattgatgcaaaaagtaatgggctgttagatggacagaaattgtctgttccgtttgataaaacagcattcaataatgaatttgatttaagtgatactgaattagaagattatatagctaaaataaatgaaaataaaattgaggtaacagttaaaattcgagaaattacaactttgcctcaatatgaaaattattctttacttcctattcaattattagtcaatcaacacagtaaggttaattctataagtgaagacgaatttatttcgaatgctaaattaacagatgggttttacatcatagtaaagaaattcgaagatgtagataaaattgctaatgaatacaaagcaagaggttattctcttaaatatgcattagagtcgtttcaaaatctatccgaaatattatccaatgtaaagttagtaagtaattattttataatactagtgtcaattataattagtataacttttattaataattgctctcaaatattatatcatcgaaaacatgaaataggattacaacaagcgctaggaattagtaaaaggagcttgatttggagtactctaatagaattcgtttttcaaagtattatagtaatgattatcattcttccaacgattatttttgaatggtttgttgttaaaagtatgttaactaataacatagtggagattaatggtttagaaacagtacttgttgtttggggaataaattggattattatattagcaatttctttaataggagctacgttcccattaatgggaacgtttaaattaaaaattgtaaatctattgaattccataaactagtttggagggaaaatatgaaaaaatattattgtatgtatttgattgttttagtattgttatctggctgtacaacaactccagtaaaggaaaatacgagtaatcaatcaatcagtaatataaaagtagaaaatataaaagacattattccaatcagcaaagaaatagtcaaggatcaaaaaattaaagtaaagtcctatattcttaatgcccaaactggagagcgtattaatacagatattttatttgatgaagttccgaatcttttccaaatgcatggatacgatatttactcttcagcatatcaatattataaagatcgtcttgttattggctgtcaatctggcggagggaaaagttatgtttataaaatatctgacgacgggcagttgactgtagacacagtcaactataatatactttattatgatgaaaataaaagattatatatagcacaaacagatgaaggatatgtaacattaaatgaaaaatatgcagtgaatgaagaatttccagtacttaaagatagcaatattactactaaagaccagaggtttatcttgcaagcctatggtgttaatgaaatttactatttaggaagatatggtgaaaagacttaccaattaatgaaatataattcaaatgaaaagaagttagttaaagtttatgatttggtagaagaattaaaacaacagggcattgattttgaggaaggatcagaaattaatccaaaaatgactctgtataaagaaggtcaaaaatcatatatttctatctcagtagatcgaatatggaatggaaaagatgactttaaagaaattaataaaaatatcctaataaatattactaataatgtagccatatttgataatgcttttgaggaggatgattctgcatatcctgaactagatttttcaagaaatgtaatgcaaagttctgataaaatatctattttcaaattaaatgaaggaaaaataataagagtgaatgactacaatgcagaagatataattaatgatggagataatcatattaactatatctatcgtatggatgataaggaaattataatgaatgtgccatcaggagttgttaaatataatattgctgaagataaaagtgaacaactatatgtagataggcttgaagaatgattctattatattttagtcttaagattaaattgtgtttgtgactgactatcctcaaaatcactagtaactttagagttctaattctaaggttgctagtgattttttgcctaatctcgtttcaacaaaacaatatcctcattcttcgtcagcaataaatccacatgattctcgccccataagcaaagtttgttcaaaatttccgacaacgattcgccgtattcactcaatgaatactcgacttttggcgggatttgctcatatactttacgaataataaccccggatttttccagctcgcgcaattgttgtgtgagcattttttgtgtgatgttggggatgagtcgttttaattcgccagttcgtttttttccttcgcgtaaatggcaaaggatgactggcttccacttaccgcctataacttcaagtgtagcttcgacaccaatattatatactttggtcataattatcctcctataggcactttttagtatctatatgacttttaagtaccttcttgttattttgtacggtatataagatactgtataacagaacgaaacaatttgcaattttttagggggaaataacgtggatatgaaaaaagtaaatcctaatttgacacttttggcgctggcgattagtgcgtttgggattggttcaacagaatttattagtgtagggcttcttccactgatttcttctagtatgggtgtgtcgattagttcagcgggattaactgtatcgatttatgcgctaggtgtgatggtgggggcgccggttttaacaacaatgacgtcgaaaatgaatcgtaaaaatctactattattagtaatgttagtatttctgatagggaatcttgtctcggcatttgctgtaagttttggaatgctccttaccgggcgggtagtggcggcatttgcgcatggggtgtttatgtcgattgcttcggttattgcggcagatgtcgttcatccgagcaaacgagctagtgcgattgcggtgatgtttacagggctgaccgtggcgactgtgactggggtgccacttggaacctttatcgggcaactatttggctggcggatgtcgtttctgtttattgttgtgataggcgtgattgccattattgccaacttctttttagttccaaaaaatttatctaatgcaagtagtatttcatttaaatcgattgggcaattattagttaataaaaaaatcgtgatggtattactcatgacggcgtttggttacgggggcacatttgttgtttatacgtatttatcgccaatgtttagcaatatgggttattcgacaagtatgatagttattttactgattatttatggtgtgatggttgcgattgggaatacgattggtgggcattttgcgaatgagcgcccagctaaagcacttttcgtgatgtttagtttgcaagggattacgttattattgcttcaatttacgtcgaccaatgctattttaggtttaattactattatgctaatgggatttttcgcgtttatgaatgtgtctggattgcagctttatgtggtgcaattagcagaacggtatttgccagaaacggtgagcatggcttctgcgcttaatatttctgcgtttaatattggaatcgcgctcggagcatttattggtggattagtaacggaatatattggtttaagttatacaccgattgtcggatttttgatggttttcatcgcaattattttaactttctatatgaaaaaagataaatagttcaaataataggccttttacagtgaatgtagaaggctttttttgtgctttcggtaggtctgacctattccggcaaggtttttttccagttatagtaaaatggatagtttttttgtcccgacaggtctgacaaaaatagctatatagcttattgtaagccctatcatgaaaatgataaattgaatttagaaagaggagtgatacctgatgaaactaaatcagcagtgtattcaaattttagattttcttatggagcaggaagattttaaaaatattggttatatttctaacgcgcttggttgttcggagcgcagtgttcgttatagtttggaaaaaatcgatatttttctccatgagcaaacgttgccagctcttatcagacatacgaggaaaggggtgctacttccagaaaagaacatcataaatccggtggtgagtaagttcaaacagcaaatcacgccgaaaaaatatcgttacagccaagaagaagtacagcaatttttactattaaagcttcttttaagtgaagaagtgcttccggttacatattttgaagaagttctttttatttcaagatcttctgtgctaaatcatctacgcgcaattgaaggggaactttttttaaataacttggatttgtcccaccaaccgcgtcatggatttctagtgactggtaatttaattacgaaaacatccctttttgcgaggagtttcttgcgttttattaacatccgagaattttatcagtttttagattcagaaaatagcttatctaaaaaaggagagttatttttttataacctttttgagatggaagttttgcaggaagtgaatcgtgaggcgcattcggttgaagagaatatgacgcgtgcgatggatgagcaactttatttaaccttaattgctattttactaaaacaacatgaaacgaaagtagattttaagtttacagcggattttgcggtgacagatgagctagataaagcgctagaaacgattattggctcgctcaagcagtaccaatatgggagtgaagatgaagctatcattgaagcttttgtgagaggtatttgcgaaaaaatgggcgaaatttatcaagtggattttgtgcatggagatacggatttttttacacaaatgaaggcgcatattaagttaatgattcggcgcgttcgagcaggggttattattgaaaatccgatttttaatgaatttatgcgtgataatcgcgaaatttttatgcgggtgaaggaaagtttggaagcattaaagccggtgttgccgatttctgttagttctcaagaaatttcctttttagcgatttactttgcatctgaggtacagcgaaataaacaaaccgttgaaatgaaaccaaacttattgattatttgtccagaaggggtcgcagtgtcaaatatgattgcgattcagttaaaacgaatgtttgaatttgagtcggttcagacgattggtcttagaaaatttaagcgtgatatgatgaaagattttgactttgttattagtacagtggatttaccagatatgcaagatgctaaagtgcttagaattaatagctatttgcaaaaagaagatatggaattactacaaaagcatttacgaatgaagttggttaaaagtgataagcagataattaacaaatttagtaagattttagcgattatagcggaaaatacgcaaattaataatttaagtaagttagaattcgacttattggaagcgcttatatctgatgagggagaggcgccaaggaaaattatcccgccatttcaatttacagaagaggccatcattatggaagaaaattgtccaacttggcgaaaagcaattaaactcggaacaaaatgtatggagaagcttggggtaattgagcctagttatcatgaaaaaatcatccataatttaaaagtttatgggccgtatatggttgttgcgccaggtgttgcgattgcgcacgctggagcaagtgatggtgttttgatggatggtattggggtgacgataattgaggacgggattatgttttttgatagatacgaaaagccggttcatgtcattttcaccttggccttaaaaacaaaagaggcacatttaatcgttgaacaattaatgaaattagcgctgaatgaagaaaaaatgcaaaaaattaaaatggctagctcaaaacgtgatatttatcattacgttaagtcagctatctttgaatgagagagggtttcataatggacatagaaaaaatatcgttttcactaatatcgctagcgggggattcattttctaaattaattgaagcattacaagccgcaaaagaatcgaacacagaactagtagatcagcttttgaaagaggcggatgatttaatgattgaagcgcacaaagtacaaacagaaatgcttattcaagaaacgagaggcgaacaagccagtttttctgttttactcgtacatgcgcaagataccttaatgaatactattttagcatcaacgttaattcgcgaaatgattgaaatgcatcaagaaatgaaagcattaaaaaaagaggaggaaaagtaaatggaaataaatcaattacatgtacttctagtgtgtaatctaggtgcatcaaccggagtaatggtaacaaaaatgaaagaaattgctcaaaatagcgaaaaactaaagaatacagacgtgaaaatcgaggcacatcctgctggagaattacgtgagcatattgaagacttcgatgttattttagtcgggccacaaattaaacaccaactaaaacatttaagtgaaatcgcagctgaatataataaaccaatccaagtcatcgatacgaaagattacggcacagttaacggagcaaacattttaaaagacgcgattatccttaaaatgaacaaataaaaaaagtggaggggaacaacatgtcgagtaaaaacaaacaatcttttatgaaccgttttatcgcttttatggagaagtattttgagccagtcgcagctagaattgaaaaacaacgccatatttcctcaataaaaaatgggatgattgctttgatctcggttttaattattggatcattttcgctgattatttcagcaatcggaaatatgtttccagcgggttctgttgtgaaagaattctttgttcaaaacgcagcagcacttaacttaccgtttcaatttacgtttggattactatcgatttatgctgccataactatttcctacagccatgcaaaacaaatgaaagtacccgtgttacatagtgtgatggccgctgttatggtaacactcatcctcaatacgaaaatggttgacggggttctaaatacagaatttctagattcaagaggactctttatcgcaatatttgcagcacttatttctgttgaacttatcggtttgtttattagaaaaaatattacgattcaaattaaaggattaccagcggggattgcgactacttttgaagcgattattccactcgtagtactgctattcagtgctgttggacttagtattctaatgcaaagtgtgacgagcgggcaaattattccagaagctttcacgacgatgctagctccggcgattaatagcattgatacaccttatgcagtgttccttatctgtttccttgaaatgctattttggtttatcggtctaaatggttatgcgattttgattggttttgtgcttccatttatgacacaatatttaggagcgaacgcagctgcttatgcggcaggagaaccaattccgtacgtatttgcgccaaacttctgggattacttcatgggattctcaggttctggtattacaggagcattagttattctggctttatttagtaaatcaagagaattaaaagcagtcggaaaagtgtctgtcgttccagcgatttttacgatttccgagccagtggtatttggacttccaatctgttttaacccatatttatttatcccattcgtacttggaacacctattttagcagtaggccagtggtttgtgttccactttggttgggttcgtccgccgattgcaaatgtaggcgggacaccgattccactcgcacagtatttagcgaccatggactggcgcgcgattattttaatcatcttcgttctcgcagtagcagtttgtatgtattatccattctttaaaatgtatgaaaagagcttaatcaaagaagaaacagtggtatcagaacgtcaagcggcgcacgatgcactggacttagatttctaatacaggaaggttgatttaaaaaatgaaattaattattaatgaaaatgaacaactcgtcgcggaaacggtaagtcaaagaatcatcgaattggtaaaggcgaaaccagcaagcttaatttgtattgctggtggggatacgccgttacttacgatagaagctctgataaaagctagtcaagctggtgaagtagatttcagtcaaacgcaatttgttggtttggatgagtgggttggcttagggcgcgaaaccaaaggcagttgtatccaaacgttgtatgatgcgttttttgaccgtttagaaaatgtttcaggtgatcaaatttgcttttttgacgggaaagcgaaggatttagctgccgaatgtgctcgggtagatgcctttattgatgagcgaggcgggatggattttattttattagggattggacttaacgggcatattggctttaatgaaccttttgtgccggtggatgtgaactgccatgtggtagagctcgatgaagtaacgaaacgtgtaatgagcaaatatttcgatacagacttaccgttaacacacggaatttcccttggaatgaagcaaattttagcggcgaaagaaatttacttagtagctacaggagcgaaaaaagtcgacatcgttaaacaagtaattgaaaaagcgccaacagttgcgattcctgcgacgctcgtaaaagaagcaaatacaacccttgtaattgataaagtagcggctagtggggtgaaggcataatggaaaaaattattgttcaaggaaggaaaaatggcaaacaaatcgagatagcttgttcgaatttagtcatgggagcaggagattttttacgcgctgataatatggattttgctggtccgatactagatcaatattttgaaatgggcggaaatatatttgataccgcgcgccattatcgtcatagcgaaaaagcaatcggcacgtggatgaaagctcgtggtaaccgcgatagtgtaattatccaaacaaaaggcggacatccggtacgagaagcaagcgatgtgccacgtgttacggcagaagcaatccatgaagatatttccgtcagtttagacacgctacaaacagatcatgtcgaattatttgcacttcaccgtgataatccagaagtagaagtgggtgagatcatggaagcaatgcatcaagaagtggaagagggccgggtatatgctattggactatctaattgggaattgccgcggattatcgaagcaaacgaatatgcagtaagccatggtttaaccccactaagtttcaatagccctaattttagtttggcaaaagtgaatcgaccacgctgggaaaattgtgtttcagcaaacgaaacgatgattcactggcataaaaaaacgggcttgccgctattttcttggtcgtcacaagctggcgggtttttctccggtcgattttctaaagaagatagaagtgatacggaaatggtagaagtttattatagtgaagcaaactgggaacgattcagtcgcgccaaacaactcgctaaacaaaagggctgtacaccaattcaaatttcgctcgcgtatgttctaacacaatctttcccaacagccgcagttatcggaccggaaaatgctgctgaacttaagtcgtctgttttggcagccgaaattacattaacgcaagcagaagttgattggcttgatttaaaggcataaggaaaggcggagagaaaatggatattcaagcgaaaatagcagtccaactatattcagtacgcaaagaaatggaacgcgatttagaaggtacgctccagaaaattcacgaaatcggctttcgttatgtgcaacttgatggtatgcgaggcaatgtccggcagaggttttacgcttacttcaaaaatatgagttgaaagttatcgggatgcacattaaacacgaccgctttatgaatgatttagacggtattattgaagaagcttattacttcggttgtaaaacagtttttgataaatatattgaagaggaagaccaaacaactgcgggttacattgcaacaaaagaagcactcatagaagcagcaggaaagttacacgcactcggttttcgcatcggtcttcacaatccggaatacgattttaatgaatgcatcaatggccgccgagtgatggattttatcacagatccagttaatggaatttgcatttacgcagaaccagatacgtactggattaaagcagccggacatgatgaaacggaatttattaaacgatacagtggacgggcgccaattgttcatatgaaagactttataagtggttttgagctagaagatatggataataacctcgttgaaatgggcgagggcgaagtaaatttccgcgctatcatcgagtggggcgaaactaatggagtggaatattattgtatcgagcaagatagatcgaaacgaaatatgttcgaaactttagaagcaagttacaactatttattagaattatagtaaaaacgccagagagttttctctggcgttttcttatgtgaaagtagtagcaacgtttacaacgagtaaggtttgggaatgtacatgtagatgttttaagggggaatgaaataaatgaaaaaaaagtggctaattttcgcaatcatttttttaattgcaagtggatttttgagcccaaaagcagaggctgcaacagattacggtagcagcttttttactaatgtagctttgcaaaatcaaaacggggatccagttactaattttaaagaaaatagcaaagtgcgggtagcgtatgattttgttattacgcaacctgttgtaagtggagagacaatgacattaacgattccggatcagctaaaattaatcaatttcggtggttttccagtgaatgatgcatcaggaaatactattgcgaatgcgacaattgatccagcgacaggaacgattaccttaacttttacacattacgtcaatacacatacaaacttaagtggtagcttgttttataatgccacttttaacagcaagaatatccaaacagaccaagtgaatccaatccagtttccagtaaataacaccacgcaaaccattaatacttatataagcaaagtaacaacaggtggcggtactggctcacctactatcgtctttaaacaagggcgaatggatgataaggacacgagtattattcattggactgttacactaaacaatgcacttacaccaattgataatgcgatttacaccgatacacttggaactggccaaaatcttcttggaaatgcaacaatcaaataccgcgacgcaaataaaaaagttctatccaccaacgtccaacctattgcgctcgatagtaatcgtaattttgaattaacaatcggtacactgaacaatcaatcagtcgtcattacttacgatactaaaatcaccacgaaacaaaaaagttatacaaataaagccactttatcaggtgacaatttagatgcagtttcaagaaatgcaaccgttaatgattacggaagcggcggacaagggacaggaacaccgccaccaacaccgccagttaaagaagaaccaccatttatcccagcagataaacaaccaattgaaaaaatcgttgaaacagactttggaccaattgaagttgtcaaagattccgaacaagatggtaaaatcaaagtcatttataaagtgaaaagtggcgatactttaccaggcgttgctaaaaaattcgatgtgactgttgcagaaatcaaagactggaaccatttaagctcggataatttacaaacgggacaaaaactacaattaactatcgaaaaaacactactatcaaaaattaccgtcccaactccgcaaaaagtgactagtacaacgagagtggatggggcagtaaacgcatctggcactttgccacatacaggtgacgaaagcccactaattccatttttggctggagtaagtttggttgcaatcggtttaaattttggacgtaaaaactaaaaaaaggaagcgctgaatttctcgagcgcttccttttatattatagaaggtgacctttttttcgatgtgtcacggtttggttttttgatttatcatgaaacgatttggaatttttgtttggcttatcgggaagattgatagttattgttttactttcggttgttccatcagccatttttgcgataatagtcactaaattatttccgggctccaagttttctaatgtaaattggtgattttcagtatttccggcaatttgttgggtctgattatttgttttaatcgaaattgttgcagcggtatctgtttgaaacattaattccgcgctatttttcgtcgtttcgatataagggttttgaatggaataagttaggaacatttccattaattcgcctgttgttgcagttgtataggtgactcccgttgattcttttttcgcatgggcaatttctggaagccagtttaaagttagcgacaaaagcgcaactattaatagaacgtaaccttttttcttcatcattctcacctcttctttttccattataaaaaagaaatatgaacaaattatgaataaaatatgatagttttaaaaaatcgctaccaatttggatggttttaacgtaagataaaaagaaaaaaggagtagagcaatggaacttgaaaatttagaaaagaaattaccgaagaaaattaaaactgtatggcggcaaacagagggaattgctgtttttgtttttcttgtttgttcggtggccgcggcaattattttatattatgctggagcctcggtttggtggagtgctattggatttggtttcactcttttatatgccgcttttatttacttattcattattccgtttcgttttgcgaggtggagctatcaaattaaacctgatgaaatggaaattcagcacggtattatttttagaagtcgtgtattaattccaatgattcgcatccaacatgtggaaacggagcaaggcccactacttagaagacaaaaattagtttccttatcaattacaacagctgcaaggacgcataagattgaagcggtaaacgcatccgagtcagatgaacttagacatcatatccttgagcttgtgaaggtggcgaaagaagatgtttgaagaaagacgcctccatccaattgctctaattaaagaaattatcacaaacgtaaggcgcaatattgttcctatcgtcgtcggtttgttttctgtttttcgcgcaattaatagcaacggttacttaccgaactgggctgtatatcttattattgtcatcgttatattgctcgttttaacccccgcggttttaaaatacattacatataaatacacactggaagaccaagggattcgtattaaatacggtttgattttccggaaaaatacttacataccttatgaacgcattcaaaccgtccaaaagaaacaatggtttttctttattccatttaacgtctgccaaattttaattgaaacagcaggtggtaatggtaaagcggaggccgacttagttgctgttcctgtgagcgtggtcgatgaattgaaagatttacgtgacgggaaaaaagcagccaaacaagatgaagtgaaagaaaccgaagagccagaagtagaagtgcttgagacagaagaagctccagaaaaaacggtgatgttacaaacaaaacaactcatattaatggccgtaacatcaggtggagttttcggaacgctcctaatcgtcctcgcattcatgcaacaattccgtgaagtcattccgacagattggatggaagctcaagcagaagaattatggaaaatgggaataattgtacttattgtcttaatcgttttgattctcctagtattatggggcatctcgattgttacgacccttttcaaatatttccagttcaaactaatgaaataccccaattccctagtcgtggaaaaaggattattagaacgaaaccatacaactatatcacttgcccggattcaaggaattaccattattgaatcaccactacgacaaatgcttggactagttgctgtcaaggtaattacagccggcaactcaggtgatgaaaaacaatcaggtgacattttactcttgccaattatgaaaaaagagttagccttaaaaacgttaaaagaaatgctacccgattatttatttgaaatagaagaaatggaacgtgctccaaaagcaagtttgcgcagatttttgcagatttacctcatttggacagtcattccggctattatagcaagtatattattcttcccacttggcttaattagtattattttaccaattttagcgggaataaaagcgatagcaagttaccgggcgactggggttttcatggataaacacacactactcgtacagtcacgaccaattttctctaagttaacccatattatccgtaaagaacgaatccaaggtttaagcttacgacaaagcatttggatggaaaaaggggattcccgccatttaaacgtctggcttaaatctggcagtacgagcgcggaggcatatgtgcgctatttaaatcaagaccaagcaataagcgtatacaactggtacagcccatcaaaaacgattaattaataaatagaacattcaattcctaaaaaatctatcgaggtaaacgcataggtttttggaagcgaatgttctattattttttttcaattaggtggaaatctggtaaaatagaaagaataaacgacacaagagatagagaggattggttaagtagtgaaacacatagtgattatcggaggcggcttatcggggcttgcagcagcttatgaactacaaaaaacacatccgaattatacgtgggaattagttgaaaaagacgagaaattaggcgggaaatttgaaacagtaaaacgggacggatttttaattgaaaaaggcccagattcctttttagctagaaagcctgctggagtgggcttagtgaaggacttaggactcgaagataaattaattgcaaatgcgacaggacggtcttacatttaccatcaaaaagcgcttcatccaattccagaaggttctgtgatgggaattccaactgatagagaagcacttctagctagcacacttgtctctgaaataggcaaagcacgcgcactccaagaaccgacaatcgaaccaaataaccaagaaacagatcagccacttggcgaattctttgaagcacgtttcggcaaggaattagtgaaaacaatcattgaacctcttttatcaggaatttacgcgggtgatatatacaaaatgagtttgcgtgctacatttccgcaatttgaacaaaccgtcagaaagtatggaaatctaatggacgggttgaaggaaagtactatgcagacaactggcacaaaaggaaccattggcgcctttcgaacgttagaaggaggcttagaccgtttaccaaaagcaattgccgacgccctgccagctgaaaacttgcatacagcgaaacaagcaacacaaatcacgaaaaaaaatacttcttatgaaatttcttttgctgatggagataaaaaagaagcagatggcgttattattgcagctacacatgatgccctgattcatttgttagcagaaacgaccacagcaccttttgcagaacaaccactaacgacacttgcaaccgtttcattagcttacgacgaaaaagatgtacctattttgccagatggaacaggttatttagttgctcgaaccgcactgtataaaacaactgcttgtacttgggtgcaaaaaaaatggcctcacatggtaccaaaagataaaatgttattacgtggctttgttggtaaagctggtgaatcttggttagagcaagcaagcgatgaagcaatcgtcactgctgtactaacagattatgcggaaataatggatttacatgccgccccacttttttatgaagtaagtcgaatgaaatcagctatgccgcagtatttagtagatcaccaagatcgtcttaaacaattgaaaaaaaacatccagacagactatccaggtgtttattttgcagggatgagttacgaaggtgtaggaattcctgactgtatagctggagcacaaactgcggttactgaattagcagatttcttggaagaggtgtaacatgattaaaggaattggactcgatatgatcgatttagaccgtgtaaaacaagcggtcgaaaagaaccctcgctttatcgaacgaattttaacagaaaaagaaactaaacaatatgaaaaatacgaaggtagccgtaaaattgagtttttagcaggacgtttcgcagcaaaagaagcgtatgcgaaagctaatggaactggatttggtaaacatttaagttttactgatgtagaaattttacaagttgaagatgggcgaccgcacgtaacgatgccgataaaacaaggtgaaactgtttttgtgagtatcacccatacagccagatcagccgcagctcaagtgataattgaacaatagaaaggaaagtgaacgatagtggtaacaggctggcaccgtccgacatggattgaaattgaccgcgcagcaattcgcgaaaatataaaaaatgaacaaaataaactaccagataaggtggcactttgggccgtagtaaaagcaaatgcatacggtcacggaattattgaaacagcaaaaatagcgaaagaagccggagcaaaaggtttttgtgtcgctattttagatgaagctcttgcattaagagaagctgggtttcgaaatgaatttattctcgtcttaggggcaactagaaaagaagacgccaaccttgctgctaaaaataatatctcagttactgtttttagagaagattggttggacgatttaactttagaggcgccactccggattcatttaaaagtagatagtggcatgggacgccttggtattcgtagtagagaagaagcacagcgaatcgaaacaacaatagcgatagatcatcaaatgattttagaaggtatttatacgcattttgcgacagccgatcaattagaaacaagttattttgaacaacaattagcaaaattccaagcaattttaagtagtttaacaacacgcccaacattcgttcatacagcaaattcagcagcttcattgctacaaccgcaaattgatttcgatgctattcgctttgggatttcgatgtatggtttaacaccttccacggaaattaaaaatagtttgccctttgaacttaaacctgcacttgcactttatacggaaatggttcatgtgaaagaactagcgccaggtgacagtgttagctacggcgcaacttatacagcaaccgaaaaagaatgggttgcgacattaccaattggttatgcagatggccttattcgccattatagtggctttcatgttttagtagaaggcgagcgggcaccaattatcggaaggatttgtatggatcaaaccatcataaaacttcctcgtgaatttcaaactggtacaaaagtaacgataatcggttcagatcatggaaataaggtaacagcagatgatgcagcagaatatttaggcacaattaattatgaagttacttgtttgttaacggagcgcataccaaggaaatacatcaattagaaggtaatattcgtgctttttttaagagaagcgtttataatctaacatatgaaactttatagctatatataggacttaagggagttcctaagctgaaactgtaacattcttaacaataaaatgcgaaataactcttttcttcatggcgtgataatggtacgatatagttgttacttacaggtacgaggctttgggggtgtgacacgtgttagagaaagaaaaacggatgataatatccgtagaactgacacaggaaatggtacaagaactcgacgtagttgtagaaaaagaaaaaatggggcggagtgaagttataatggaagcaacgcaacaatttttacaggagaaaagagctcgtgaattaagagacgagatggaacgcggctatgcagaaatggcgacgattaatttcgctatcgcgtgcgagtgtactcatgtcgaagcagaggcagaagacaggaatattagtattttaggaggttaatggctgatggtgaagcgtggtgacgtttactacgcggacctttcccccgtggtcggaagcgagcaagggggaataaggcctgttctcatcattcaaaatgatattggtaatagattcagtccaactgtgatcgtggcagcaataactgcaaaaattcaaaaagcgaagttgccaacacatgtggaagctactcgtaaagacggctttgaaagagattctgtcattctattagaacaaattagaacgatagataaacaacgcctgacagataagattacacatttggacgaggaactaatggccaaggtaaatcaggcacttgaagtcagtctaggagtagtagaattctaaacaatcctaaagaaataacatacaatgatgaatgcaggcaaagggtctgacgtaaaaaaagataattaatacataagaaaataattaactagtctggctaagcaaaaagggcatcagaaacctacaaacaacgcgtaatcaacctattcgctaaatttgtttctaatgtctttttttaaagaatagttaatcaaaccgcataataatagagaaaattttgttaacaatggagaaaggttggaaaataactgatgtataaagattttgcaaacttcatccgtacaaataaaaaagacttactaaataattggatgaatgaaatggagaaacaatcagatccgcttattaacgacatcgctaaagaaccgatgtacgaagaaacaagcattgaatttgttgatttgattgtctcgaatattactgaaaatggctctaagtttaatgaaaaacttgatgattttgcagagaaagtggtccacctaggttggccgattcattttgtcaccactggcctacgagttttcgggcttttagtatatacagcgatgagagatgaagatttattcttaaaaagagaagaaaaaccagaagatgatgcctattatcgctttgaaacatggctttcctccatgtataacaaagtggtcactgcctacgcggatacgtgggaaaagacagtttctatccaaaaaagtgctttacaggaattatccgcaccacttttaccaatatttgaaaaaatttctgtaatgccgctaattggaacgattgacacagaaagagctaagttaatcatagaaaacttactaataggcgttgtaaaaaatcggtcagaagtggttttgattgatattacgggagttcctgttgttgatacaatggttgcgcaccatatcattcaagcatcagaagcagttagacttgtcggctgtcaggcaatgcttgtaggtattagaccagaaatcgcgcaaactatcgttaacctaggaattgaattagatcagattatcacgaccaacacaatgaaaaaaggcatggagcgtgcgctagccttgacgaacagagagatagtagaaaaagaggggtgaatactgtggggataccaatcttaaagttaggtgaatgtttattaatttctatccagagtgaattagatgatcatactgcggtagagttccaggaagatttacttgcaaaaatccatgaaacgtcggccagaggagtagtcattgatataacttcgatcgattttattgattcatttattgcaaagattcttggagatgtagtaagtatgtctaaattgatgggtgcaaaagtggttgtaactgggatacagccagcagttgcgattacactaattgaactcggaattacgtttagtggagtgctttcagcgatggatcttgaaagtggtctcgaaaaacttaaacaggaattgggggaatgaacatgacattccaatcctgtgtaaagataattaatgaatgggacattgtggctgcacgacaattaggtagaaaaatatccaaagaaattggctttggaacggttgaccaagcaagaattacaacagccatcagtgaactagcaagaaacattttcctttatgctggaagaggagagatttgcatcgaaaaagtaagcgaatccggtaagcaaggaatgattattgtggccaaagataaaggcccaggaattgtagatattagaaaagtaatgcaagatggttatactacatctggcggtcttggagcaggtctcccgggagttaaacgcttaatggacagttttgatattgaatccagcattgaaggcgacacaagaggaacggtaattacaacaacgaaatgggttcggtaaggagagctaggaaaaaatggaaaaagcttttgaaggaaaataccgtgatattcttattcaatatttagaacatcaagatgaagaaattctttatacttgcgagaaattatccagagaagctatggaagagcgagtttcatcagaagaaattgtccatttacatcgctcagttcttgaattatacggaaaagagttgccagattttgtacgattatcatttgatgttttactcgaaataatggtaggttacggcttagcttatatggaacatctgagtctaagaaccgaacaaaaagcgttacgtagcgaaattgctcaagcagaagatatgcaaaaaaccttaatgaaaacagatgtgccagaacatgattcgcttgattttggcgttataagtgtcgcagcaagacaaatgagtggcgactattatagctttacagaagaaggcgataagcaaattggtgtcgcactcgctgacgttattggtaaaggaatcccggctgcatttagtatctcgatgataaaatatgctctagcagggatgactggtgacgaccgaaaaccatccatcgtcctagaaacactgaaccaagtagcggaagaaaacattaatgataatatgtttatcacgatgttttacgggctttatcatgaagatacgcatttgtttgaatatggttctgctggacatgaactaggtttatattaccaacataaagaaaacagcttttctgatttatatgccaaaggtttacctctgggtgttgataaaaatgctgtttatcgtcaatttgataagaaaattgaagttggagacgctatttttattatgtcagatggtgttactgaaactagaacagcaaatggatttatcgaacgagaagagttaacagaaattatagcagcgcatatttcattatcagctgaaaaaatggtacatgcaatttatgatcaattagttaaaatgcaaaactttgaattgcatgatgactttacacttatttgtattaaacgaactaaataagtccaaagtagagacgtacctcattctttaaagagcatttactggtgagtaaacgtatttaaagagtggaacgtttttattttttaatgttttaattttatttgttagggtaaaatcgacagtatacttaaattagatggggtgaagtgatgaatattagtatagaaataaaagaacgtgatactgaccacatagacatatttgttgctggggagatcgatgcttatacagcgccaaaggtaaaagaagcacttgaagtatatcaagtaaaagagggtattgtacttagaattgatttaacagaagtaagttatatggatagcaccggtttaggcgtatttgtaggggctttcaaaagcttacgacaacgccaaagtgaacttgtcttgtttggtttaagcgaccgacttttccgattgtttgaaatcacaggattgtcagatatcattgaaatcaaaaatgtagagggtgaaatgaatggcaacaatgcatgacaaaattacattacaacttcctgccaaacctgaatatgttagtttaggtagactttcattatcaggaattgcaagtcgcgcaggattttcttatgaagcaattgaagatttgaaaatagctgtaagtgaagccatcactaattccgtaaaacatgcatttaaaggtgaagaagatggtgaaattactgtagaataccatatctatgaagacaaattagaagttcgtgtttctgataatggaacaagcttcgacctagaaactcgtaaacaagaaattggcccttatgaagtgggtgaagatgcggagatgatgcgcatcggagggctaggtttatttttaattgaaacattaatggatgatgtgaaactttattacgatgaaggggtttctgtcgtaatgaccaaatatattaatgaaaagcaggtggaggagaatgccaaaagtatctcaacctgataaagaagcaaaagaaaaagtgtatatttggattgccgcttaccaagaagacggtgacgaagatgcccaatataatttagtcattcattataaaaacttagtagaatcaattgcccgcaaatattcccaaggtaaatcttttcacgaagatttagttcaagttggaaatattggtttgcttggtgctattagacgttatgatgctacttttgggaaaagctttgaagcatttgctgtgccgacaattgttggcgaaattaaacgttttttacgtgataaaacatggagcgttcatgtaccacgtcgaattaaagaattaggtccgaaaattaaaaatgccgtggaagagctaacaagagaactacaaagctcgccgcaaattagcgatattgcagattttatcggtgtcacggaagaagaagttttagaagcaatggaaatgggaaaaagttaccaagcactttctgtagatcattcgattgaagcagattcggatggaagtaccattacgttacttgatgttgttggtggtacggatgatggatttgaacgtgtgaatcaacgtatgcttttagagaaagttctccctgttttagatgagcgagaacagaaaatattgcaatatacattcattgaaaatcgtagtcaaaaagaaactggtgaactactcgatatatcacaaatgcatgtgtctagaatccaacgtcaagctattaaaaaacttcgagaggcgttgcagaatgaggaagtggagtaaatgaacaaggcggttgaatcaaataatttatttgtatttcaacgttctaaagcattacaacaatactgcggggatgtttattttacccatgaagacaaaaatggttttttgtatgttctttctgatggactcggaagtgggcttgaggcgaatagagccgccaaagcgaccgttgaagccataaaggaagatattcatgcggatattactgatatgcttgaaaaagctaaccaggccgtttctggacttcgtggtgctgcgatagcaattattaaaggtgactacttaacgaaaacactttactatactggtatgggtaatatccgattttatatgattggcatagaagataagcttatttttccgctttctggttctggatttttatccggaagaaaacagaagtaccggatgcaatcttttaaatacaaaccaggcagtaagtttttgatgcattcagatgggcttgttctttctcgtgttcgaaaaagtctcgaatcaccactttgtgtagtgaaaataggacatttaatcgagcgaaatatacttgatattccaacagatgatgtaactttcatgattggaaaatttccagaataacgcaaacaccttttaaacgagcaatggtttaaaaggtgtttttttaaatcgggtgtgagaacttagtctatttatggtatattagaatagagcgctagtttttatacttcatcatgtgataaaaatcacttagtaagcgtgaagcgatattgctttgcgttttttcgcgcggattaaaatataaataagagagaaggagcaaattgaagaaagttttatcgaatagtgtaaaaggttatacgtgggcgagatttagaaaagacttgcttgcggggattatcgtgggcatcattgctttaccactggggatgtcatttgcgattgcttcaggagtaaagcctgaatacgggatttattcaagttttgttgctggtattattgtttccatttttggtggttctagatttcaaatagcggggccgactggggcgtttattcctgtattacttggaatcgtcttaacttatggttatcaggatttacttgtagctgggatgatggctggggttttactttgtttaatggggattttcaaacttggaacgttaattaaatttattccgcgcccggtaactatcggttttacagcgggaattgccgtaacgatttttatgggacaagtggggaatttccttggattaactggaatggaaaaacatgaatcatttatagcaaatatgaaagagatctggctacacttagattcatggaatttctatagcgtgttaatttcctgtatttgtatgtttgtattatttgtttttccaaaaattttaccacgaattccagcgccactcattggtcttgtgattacgaccgggattgccatgctgtttttcaaagatgcgcttccaacaattggatcggcatacggagaaatcccgagtacttttccaccattccaatttcctgatatgacatttgctaatatgagtaaattgattgggccggcttttgttattgcaatgctcggtgggattgaatcgcttctttcggcagtggtagcagatgggatgacgaatacaaaacataatagtaaccgtgaattgattggacaaggtatcgcaaacattgtgacgccaatgtttggtggtattccagcaactggagcaattgcaagaacagcgaccaatattaataatggtgccactagtcgtgtttcaggagttattcatgggattttcgtattgcttactttacttgtccttgcaccagtagctattaatattccgattgcagcaatggcgccgattttgatgttagttgcttggaatatgagtgaacgaaaaacatttcaacatattatcaaattaaaatcaggcgatactctagtgcttgttattacttttttattaacagttttcgcaagtttaacagtagccgttgaagtgggattattgcttgcggtcgtgctcttcgctaaacaaatgggcagctcgatgcaaattgaagaaattgaaccagaaggcgccgaaatagctcctcatttacatgataaaattagcatatttacgattcgcgggccgcttttctttggtgcagcacaaatttttcaacaaaatattattaaagcaatccatgtgaaaccagaatttcttattttgcgaatgggaaaagtgccaattatcgatgctacggcagaaggttatttccatcaaattgaaaaagaattttcgaagcaaggtgggcaaatcttgattacgggcctaacagacaaagcgaaagaaagtctgaaaggtagcggactttatgaccgaattggggaagaacacttctttttacacacagaagacgcggtccattatgcggaaaatgctttaagtgagcttagcagatagcttttgtcagttgaaacgtaattatgttacacttaatagataatgaaataattggaggctatcaagtatggaacaaatgcaagaaaaaataatgaaattagtccaaaaatcgctaacttataaaccagcgcaaattaatgccgtaattaaactaatggaagaaggcaacactgttccatttatcgcacgttaccgtaaagaaatgactggtagcctagatgaagttgaaattcgcgatattgaagaaacgtttgaatacgttactaaattagaaaatcgtaaagaagaaattattcgcttaatagatgaacaaggaaaattaacagatgaactaaaagctgcaatcataaaagcagaaaagcatcaagcattagaagacttataccgcccttataaacaaaagaaacgcactaaagcaaccattgccaaagaaaaaggcttagaacctctggccgattggttaatgagctttccaagtaatgcaaatccacttgaagaagctgccaaatacatctctgaagaaaaagaagtgacatcagcagaagacgctttactaggcgcacatgaaataattgccgaacaaatcagtgatgaacctactttccgtgaatggattcgtaacttcactagaaaattcggtatgattgaatcacgagcaaaaaacgcagaagctgatgaaaaaggcgtttacgaaatgtactacgaatttaatgaaatgattggaaaagttgctagtcaccggatacttgcttttaatcgtggtgaaaaagaagatattttacgcgtacaagtccaagtagacacaacaaaaatcttccaatatctttttgaaaaagtaatccaaaaccgtaattctgcaacacgaacctacgtagaagaagcgattttagatgcctataaacgatttatcggtccagcaattgaacgtgaaattcgcggtgaactgactgataaagcagaagaacaagcaatccatattttctccgagaacttgcgcaaactgctattacaaccacctttaaaaggaaaaatcatccttggtgttgaccccgcttttagaacaggttgtaaattttctgtattagatcaaacggggaaagtgctagaaatcggtgttgtttatccacatactgctaaggcgcgacgtccagaagcaaaacaaaagatagctgagattttatccacctatcaagtagaagttatcgcgattggtaacggaacagcttctcgtgaaacagagcaatttatcgtagaagttattcgcgaatcaaaatcaaatgcttattattgtattgttaatgaagcaggcgcaagtgtttattctgcaagtgaaacagctcgtgaagaattcccggattatcaagtagaagaacgtagcgcagtttctatcggacgccgcttacaagatccattagcagaacttgtaaaaattgatccaaaatcagtaggagtaggacaatatcaacacgatgttgcccaaaaacgcttgaatgaaacgctaacttttgtcgttgaaacagccgttaaccaagtaggcgtcaacgtaaatacagcatccgcatcacttttacaatatgttgccggtttaaacaaaacagttgcaaataacatccgtaaatatcgcgaagaaaacggttctttcacttctcgtaaagagttgaaaaaagttcctcgtctcggcgcgaaatcatatgaacaaagtatcggtttcttacgtattttagagggcgaaaatccacttgataaaacagctattcaccctgagagctataaagcagcagagcaaattgtaaaagcagctggttttggcttgaatgatattggtagcgaggatttaaaagcagcattacaagctcttagtatcccagaagaagcagaaaaactaggcattggtaaagaaacgatgcgcgacattattgataacttaattgccccaggccgcgaccttcgtgatgaactaccagctccactattaaaacaagatgttatttcgatggaagatttaaaacaagggatggagttacaaggaactgttcgtaacgttgttgactttggcgcttttgttgatattggcgtgaaacaagacggacttgtgcacatttcaaaactaagtaattcctttgttaaaaacccgatggatgtcgtttcagtaggagacgttgtaacagtttgggttgatgaagtagacacgaagaaaaatcgaattgctttaacaatgcgtaatccagatggaagtgtcaaataatgaatcaaacagaattgcagcagcacatggaagaagtgtcgctgcaatttttccaaaaagaattccgtcaccaagctgtttttaacacgcgtttacgaacaaccggcggaagatatttactcaaaagccacaatatcgaaatgaaccctaagtacttagaaaactttggcttagagtactttttcggcattatgaaacatgaattatgtcattatcaccttcatttagagaaaaaaggctaccaacatcgcgacaaggattttcgtgaattattaaaaaaagtagacgccccaaggttttgtgctgcgattccgcgtgaaattacaatgcatgaatatacatgtaaaagttgcgggaagtcatttttaagacaacgtagatttaatgtaaaccgttatcgctgtggcagttgcggcggaagattaaagcaaactggttcaaaaaaagtttatacagaatccccctaaaaagccttgcatttttgcttaattctgcgtatactaatggaagtcagataattcaacagtagctccgttgatagcgtaattggctgttaaccgagtgggcgcaggaacaagaatcctgcctgttgcgtttggggaagtactcaagtggctgaagaggtgcccctgctaagggtataggtcgctcacgcggcgcgagggttcaaatccctccttctccgtaattaagaaaggttaccttataaatgttaaggtaaccttttttgcgcgctaaaattggcatttgagaagagagttgctataataagaaaaacgtttcagaaaggaatggactatggataataagctagaatttacaacgattgatgaatatattacccaagcgccaccagaaacaaaagaagtgttgcaaaaaataagagagacaattcaagctgctgccccagaagcaactgagaaaatcagctatcaaatgccaactttttattttgaaggaaatctagtgcattttgcagtcgcgaaaaatcattacgggttttatccagcgcctagtggcatttcggcctttgagaagcaattaggaaagtataagtattcaaaaggtgcggttcaatttcctatcaaagaagaagttccttatgaattaattaaagaaatgacacttttccgattagcagaaaataaacaaaaagcagcagaaaagctagcaaagaaaaagaaaaaataagtttgaggctttcatcaatatgatggaagcttttttgtttggtcttttattttaaaaagactagacatttaaaaataaatgagtataataataaatagaaaacgttttcttgtagaaaaaaatacgtttgggggaagaaaagtgaataaatttatggagttgcttggggataaattaatgcctcttgctgcaaagttaggggagaatcgttacttaacgactttacgagatgcttttatgttagcgtttccactgacaatgtttggttctattgctgtagttttgatgaatctgccattttggagtgatgaaacgaaagctactttacaactttatttaggaaatgcccaaaatgcgacgatgagtattatgacggtttttgtcgtttttggtattggttattcgttatcgaagtattataaagtagaagctatatatggtggtgctgttgcgctcgctagtttcttgattttaacgccatttttctttaatagtgccaatggggaattagttactggagcactttctttagacagacttggtgcaaaaggtatgtttattgggatgattactggttttattgccggagaattatatcgtttcttcgtgcaacgtgattggacgattaaaatgcctgatggggtgcctccagcagttgctaaatcatttgctgcattaataccagcagttttgacattaagtatctttttagtaattaatattattgttcaattcttcttcaataccaacttacatgatgtcgtgtacacggttattcaaaaaccgcttgttggtttaggatcgggaattataccaactttgattgcacttttctttgtccaagtattgtggttcttcggtttacatggtcaaattattgtaaactcggtaatggacccaatttggaatacgttaatgcttgaaaatctggatgcctataaagctgggtctccgttaccacatattattacaaaaccattcatggaagtatttactgtcggcatgggtggatctgggatgacacttgctgtagtaatcgcgctcgcttttctaatgaagagcaaacaaagcaaggaaatcggtcgtttagcgctcggacctggtatttttaatgtaaacgaaccggtattattcgggatgccaatcgtattaaatgcaacaattttaattccgtggatacttgcaccattagttgtcactacacttaattactttgtgatggctgctgggattgtaccagctccaactggggtatctgtaccttggacagtgccaattatcatcaatggaattttagcaacaaactcatggctcggtggggcacttcaagtggtggatttcttcatcgtgttaatcatctggtatccattccttaaacttgttgaccgtacgaatatagcaagagaatccgaagcagctatcaaataagttatgttttccttttcgatatgctataatttgattggaaatggctagacatttttaattcaaacgaaggagcgatcgacttggttaagtatgaactgattgccgcagaaatccgtgaaaaaataaacaacggtacttatccaccagaatccattcttcctgatcaagtgagcttatctagagcttatgattgtagcagaatgacaataaaaaaagcctttgacgtacttgcgcttgaaggacttgtttacagacaacgtggtgcaggaacttttgtgatgaaaaatgccttagctaataaacaagatgcgagtttgcgagattatgacggtctaacaaaaatgatgggagacaatcgaatccgaagtaaaatcattgcattcgatattgctttcccagatgaaaaaacgcaagaacaactcttgattaaagcagaccaaccagtgtataaattgattcgtttgcgcctgttagatggtgagccgtatgtattagagcatacaaccatgccagcagatttagttccaggtttaacgagagagattttgcatcattctatttatgcatacttacaagacacactagggctcgttttaagtggtgcatttcgaaaaattaatgccgataagccatctgaatatgaccaagaatatttagcgtgcggagaacatgatccagttttagaagtggagcaagtagtgtatttaaaagacggtagaccagtcgaatattcccgttcaagacatcgctatgatacgagaagtttcattatggttgatcaccgagaaaagtaaaataaagtcagcgtgcctttttataagcatagctgactttattttatactagcaaaaatgcataaaaaacatgagatgaaaaatttgtaaataaaattagaaaaagccgttgacagtgactgagattatgttataataaaaaagctggtgtaagagaaatgaattcaattgaatatatattcatttttcgttttttatctggcccgttggtcaagcggttaagacaccgccctttcacggcggtaacacgggttcgaatcccgtacgggtcacttttttattcattttctatacatatggttccgtggtgtaggggttaacatgcctgcctgtcacgcaggagatcgcgggttcaaatcccgtcgggaccgctcaaaaagaatccaagtttaacttggattctttttttcgtatcggaaattggacatggctttttatttgagctataatcttattattcatataagaattgtaagaattaaattggaggaattaatcatggatttagtgaaaaatgggaaagtattagaacttgtacatccaaatggaaactggacattaattaaagaagaaggtttttctccagttcaaataacagtggctgcggttgcggcttgtagcggatatgtatatcaaacattacttgagaaaaaacgaattgagataaatgatttaagcattcataccgattatgagcaagatcaagaaagtgccgtgcatgttttaacgaaaattaacgttactttcacagttgatttagtggataaaagtaacgaagtgaaagccgaaaaagccgtgcatttagtgaaagatgcctgtccggttgcgaaaagtttagacccttcgattgaaattaacgagattgttgtttttaaataaaagattaaaagaccgggctccattgctcggtctatttttttacattgagtttggcttgattacttgtagggaaggctatatactgaaaccaaactatacaaacgaggtgctggaatatggcagaaaagacaatagtagaaaaattacaactgactaaatataaagaagcagtcattctaaatcaagcagatggagcggattattttcgaaatttagcgaattacgatgaaaaactagcaaataagcaatatgacttaattttcgattttgttgaaacgctagaagaattggtgtcttttacgaaagaagtcattgctactaaaaaactttccacgaatggttatttatttttcgcctatccgaaaaaaggcaataaaaaaattcgctacatatgtacaccgcgatgaactcatgccggcgcttaaaaccgatgaggaaggttacgtcgacggtagcaccctcaaattcacgcgaatggttgcgcttgatgaaacatacacggttgttggtctaaaagaagcagcaaaactaaaagcgaagggcgtaaagaagaataatccttccgcagatgaatatgccgattatgtaccacttgtcgcagagtttttagcagataaaggtgatttacaagctttttacaataatttagcgacaggataccagcgtgtttgggcgcgttatatttattctgccaaacaaccagccacacaagaaaaaagacgtgtagaaatggtcgatattttgagccaaggatacaaaacaaaagatctttaccgccaaggaaaaaagtaaccagataattttatttggttatttttgcgtttgaaactgcttctttatgtaaaagtgtggaaccgtgatagaatagaggaggaataaggcgaaggaaaatcttgttgcactggaaaaggggacatgcaggatggcgaattatattaacaaagaaaggcgccaaattgattttgatccatttgaattacggataattgccgtaccagaagtagtagcggttcaatttaagccgcgctcagaacatactttacttattcgtattgcggatgttggcgcaacgtatcagccactcaaacacgaagcactttttgaagctattttgcccgttcattttaacgatattaacgaagaagacgattactggggattaagtgacaaagagcaggccgagatgaagctgtttaatgaggttcatcgtgacttgatttatgattttgtggatgaacatccagatttcacgcaaatcgtagtccattgtcatgctggagtcagtcgaagtagcgccgttgctatgggtattgctgaacatttaggagataccgacacctatgaaaaacttcaagtgattaaacgttacttaccaaatccgcgggttctcgcgattatgcggggcgaagcgtatttataaaaacgaaaacgaagaaatgttaggagagattttgtatggagaagcattatgattatattgcgattggtggcggtagtggcgggattgcttctattaaccgcgcggcaatgcacggggcaaagtgtgcattaattgaaccaaaatttttaggtggtacttgtgtaaatgttggctgcgttcctaaaaaagtaatgtggtatggcgcacaaatcaaagaagcaatggatttatacgcagatgcttatggttaccaagtagattcaagctttaacttccaaaaattagtagaaaaccgggaagcttacattgaacgaatccgaggttcctacaaaaatggacttgataacaataaagttgaatggatcaaaggttacgccgaatttgtcgatgaaaaaacgttacgagtgaatggtgaattagtaacagcggatcatattttaattgcgacgggcggcgaaccagcacttccttccatccctggcgcagaatatggcattacttcagacggcttttttgcgttaaaagagcttcctaaaaaagtggcggttgttggcgcgggttatatcgctgttgaattagcgggtgtattacagcaatttggatcagatacgcatctttttgtacgtaaacatgctcctctccgtaattttgacccgattttaacagatacattgaccgagcttatcgagcaatctgacatgactttgcataaacatgctgttcctcaaaaagtggaaaaaaattcggacggtagtttaactatctttttagaagatggtcgtacggaaacagtagatactttaatctgggcaatcggccgtaaaccggttatcaaaggtcttcaaatcgaaaaagcgggcgttgaacttgtggatagcgggcatattgcggtagataaattccaaaatactaatgtagacgggatttatgcagttggcgatgtaacgggacattacgaattgactccagttgcgattgctgctggtcgtcgtctttcagaacgccttttcaataataaaaaagatgctcatttaacctatgaaaatattccaactgttgtctttagccatccagctattggtacagttggcttaacagaaccagaagctattgaaaaatatggcaaagaaaatattaaagtatatacgtctagctttacgtcgatgtatacagctattacagaccaccgcgagccttgccggatgaaattgatttgtgaagggaagacagaacgcgtaatcggcctgcacggtattggttacggagtggatgaaatgattcaaggattcgccgttgctattaacatgggagcaacaaaagctgattttgataatacagttgctatccacccaacaggatctgaagaatttgttacaatgaaatagaaaacaacgatggaggaggaagtacgtaatgggaaaaaaattatcactttattttgtaagacatggtcaaacatatttaaacaaaaatctacgtatgcagggctgggctgatacgccgcttacaccagaaggaattgaagttgtaaaagaaagtggtcgcggacttgccaaaacggaattcgtcgcagcctattcaagtgacttacaccgtacaatcgcaacagcaggacacttactaaaagaaaataaacatgcattcggcttaactcttgaaccactaagcgaatttcgggaaacattcttcggttcctatgaaggtgaaaaaggcgatgtagcttggaacgaaattgctcatcatatgggttacgcaaatcaagacgaattatttaaaaacgcagatgttcgagaaacgatgaatggcacgaaagccgctgacccaactggtgatgcggaagattttatgacattctggactcgggtagaacaaggtttcttacatgtcattaaccggcaccgtgaaacaggcgggaacgttcttattgtcgctcacggaaataccattcgcaacattgtccacgaactagaaccatccatggacgaatcggtcattctagacaatgcgagtgttactgttttagcttatgaaaatggtttattcaaattagaacgtttaaacgatacttctcattttaaaaaagcatagaaaaaacgagctttaggaactagtttcccaaagctcgtttttttattctgtcggcggattagacccaggtggattattatcaattgccagctggcctcgccttaatttaattaaccgattcacattgacgataattgtttttactaccgcgtaaagtggaacacctaagatcattccaaaaattcctgctaaattacctgcaacaatcaagatgatgataatagtgagcgggtgaattgataatgatttacccataatatatggagaaagtaagttagagtcaatttgttgaacgatagtaacgacaacaattacgagtaaagcctgaactggagaagtgaatagcgccacgataaccgcgggagctgctccaaggaatggtccaagataaggaataatgttcgttgcacctgcaataaatccaaacagaagcgcatatggttgaccaataattaagtaaccaataaaagtaaacaaaccaacaaacatacaatcaatcgcttgagaactaatataagtagaaattgttttgttcatttctttaataatttgtttcgcttcagtacgaatgcctgctgggaaaaatttgccagaagactcaacgaatttatgaccatctttaaacatataaaagacgataaatggaactgttacaagaatcataacaaaaccagaaacaaacgagataatcgcgccaaaactagatgctaccccatcaactaccacagacataattttcggtaaggaaatgttgagtttcgaaagttcttgtttcatatcaatatcttttaatgcagaattatttgagagactttgtagccatttttcaaaatcttgccagtaacctggtattgcttttgcaagttcggctacttggtcagcaagtgttggaccgagttgcattacagctagaacaacaagcgcgataaacgcgataaaaatcaaaataacacttaaaagtcgcggaacttttctcttttctaaaaataaaactagcggattgaataaatagaataaaaatcctgctactagaataggcataaataaagtggaaacgattataccgattggtgaaaatatgtacttcatctgcaacagaataaataaaactgccacaactgctaaaatttcaatagtccaaaaaaacaatttactatccctaaaacgtgaaaatttcaaatgatccccttctttctataaaccttattgttaaattttatagtaccattaactgctttaaatagccactgaatttatgatgttgacttaaaaatatatgtgttatacaatatgtataacagttggagaagaggtgtttgtatgttactcgcgattgacttacaatcagacgagccgatttatacacaaatatgtaatcaaattattgaaggcatggcaaaacgggaacttttaccgggagataaacttccttccgtgcgaagtcttggtgcggatattggtattaattttcataccgtaaataaagcataccaaatcttaaagcaagaaggatttattcaaatacaccgccaaaaaggagtagttatacatccagatggcgtggcaaaagcagatcaactatttttcactaagctgcaaacaaaactaagaccattaattgcagaatcgattgtgcgtagcgttagtgaggaagagtggctagaaattagtaaagctatttttgacgaaataaaagggcggggagtggagtagttatggaaatcatcatttatatttttgtgagtattgctattatttcactgcaagcaattacgccatttgtaatacgtaaatccgaatgtttcggggtaaatgtgggcgaacgcgctaatcgaaatgcagaactaacccaacttaaaaaacaatatgttggtcaagtgattttatggactgtattggttgctatcattggaattgcattaattcaaggttttcattggagtgaaaacattcaagcgggaatctttatcatatccatgttcggtcaattaattgtttctttcattatttactatcgttttcatcacacaacattacagtggaaaagagaaaaaatcgagtctggtgaaatttcaaccaattcgattatcatggtagatactagttttcatcgcaggaaaatggttatttcgtatacttggtttgtagtaccattacttatttttattatcacactggccattacagcagtgttctatccgtttgcaccagaagaattcccagttcattttgatatgaatggagttgtgactgacaccgttcaaaaatcggtgagagctgctttacttttaccaatgctacaattagggatgattgctttatttatatttattaatttcgttattgcgagaagcaaacaaacggtggaaaatgaaaacccggcagattcattaaaacggaatatgctgtttagacaaatttctagtaaagcaatgttgattatgtgcgttattctggttattgattttctcgtaatgcaagcagttattttactttcactctcgcctgaaattatgatgattaccatgagtatttctatcatcttaatattacttggaacagtactccttgctgtaaaagtaggacaaggtggaagtagattaaaatttgctaacgaaccagataatgtgaataaaccaattcgtgatgatgatgcgttttggaaagctggagtaatctattttaacaggaatgatcctgctttatttgttgaaaaacgttttggcattggctggacgatcaacactgcccgccctgttgcatggctcacttttgtttttattattgcagcgatagttttcattagtatcttgttttaagtaaagtttagtagggtatttatcatgtgttatgcggataaaaaattaaaatcatctatgaatcttctgccgtaatattctttttaaaaggagtgttaatcatggcgattagacaaggacgattagaagaatgggaaggtttcacggggattgggcttgttcacgaaggattaaaaacagaagcatttcataccggaattaaaacagcttttaaagaaatgctcaaacttgcgcaagaattagatgatttttcagaactaaaagaggtctatggtatttccgtccataatatagaagatggtataacgcattacgctgtcatcccagttgagcaaaagtacgctcatttaaaagaaccacttgaatggattgaagttccagcacatacttattttgtagcggaacatatagcagagaccgatatactagaaagttacgaggaaatagctcgagcaatacaacaaaaagagtacaagccgtatattactgcaaacaatcctgtttttgatccattaccatttaaattagaaatatatgcaaaaaatggtgaagaaagtgcggatattgaaattaggatacccgttgtaaaagaactccatacgtaaaacgcgagcccgggacttttgtgccgggcttttttatactagcaagctgtttttgattatgctataataagaacgcaattttgtgattattttaacaagaaggaagggattcatgtgggatattatagcccgcaggaagtaacagagattacgattgaaaaagggacgcaaaaagcaaattcgagtacattaacgctcgttttactaggctttttgggtggcgcctttatttctcttggttacttattatacatacgcgcagtaggaacaatgcctcacgaatggggcagttttgcaacgcttattggtgcgagcctttttccagttgggcttgtgtgcattttactcggtggaggagaattaatcactggcaacatgatggcggtagcgattgcttggtatgacaaaaagatttccttccaacaattacttagaaactgggcgattgtgtccgtcatgaacttagtcggcgcctttttcgtcgcatacttcttcgggcatttcgttggcttaacagaaggagattttttacccaaaacacttgcaacagctggagcaaaaattaacgatcctttctgggttgctttcgtttcaggtatcgggtgtaactggtttgttggaattgctgtgtggctttgttacgcggctaaagactttgctggaaaaatcctcggtatttggttccccgtcatggcttttgtagctatcggatttcagcacgttgtcgccaatatgtttattatcccagccgcaattttcgctggatactattcatgggcagattttatttggaacgtcatcccagtatacctcggaaacgtagtcggcggagcagtttttgtcagccttttctatttccttgcatataagaaaaacgcaccgaaaaaagtaaaagaagaaatacatcaaccaattgaagaaaattaattataaaaagctagttgcacccgttgcagctagttttttttgaaaaaaattaaagttttttagaaagtcgctcgtgcccatcatgctgggatagagcaagttttcttataagccattttctgggtttaagaagaaaatcctgattaaatttttcgatttgtggaaaacactattataagcaacgatagattcggacagaaaaatttactaaggagtggtatttttgagtattaaagaaacaagcttaccaaaagttcaaaccaaattatttattaatggaaaatggatagatggcgataataaagaaacaaaagatattgtaaatccagcaaacggcgaagtcatcgcgaaaattgctcaagcaggacctaaagaaacaaaacaagcgattaaagctgcaaaagatgcttttcctgattgggcgaaaatggaactagctgaccgcgttaaactcttgcataatattgctgatttaatggaagaacgagcagatactttagcaaaaattatgaccttagaacaaggtaaaccattaaaagaatcaaaaggagaagttttaaccggcgcggaaaacttccgattcgcagctgaagaagcaagaagactatacggtgaaacaatcccagctccaaacaaccacgcgtttattgttaaaaaacaaccaattggcgtagtagcagcaattactccgtggaatttcccgggtggaatggtgacacgaaaactcgcaccagcgctagctacaggtaataccatcgtgttaaaaccatctggagataccccgctttcggctttagctatctttgaaatttttgaagaagctggcttaccaaaaggtgttgctaatattgtcatgggaagctcgaaagaaatcggtgaaactttaacagatagtgatgatgtccgcaaattaacgtttacaggttcgacaaaagtcggtcaaacactatttaaacaatctgctgacaccttgaagaaaatctcgcttgagcttggggggcacgcaccatttatcgtgtttgcggatgctaaccttgaagctgcagtagatgatttaatcacagcaaaattccgtaacaatggtcaagtatgtgtatcaccaaaccgcatctttgtagcaaaagaaatcaaagaaaaattcactaaaacattagtcgctaaagtagaaaaactaaaagtcggtaacggtttagacgacgtaaatgttggtccgcttattcgcgaagatgccatcgacaaaatcgacaaacaacttaaaaacgcgacagataaaggcgccaaagtcctaactggtggcgaacgtttaactggctctgactacgacaaaggtaatttctataaaccaactgttttagataacgtcactcgtgaaatggacatcttttatgaagaaacattcggccccgtaattccgcttatcgtttttgaaaatgaagatgaagcaattgaaatggcgaatgatagcgaattcggtctagcatcttatttctatacaaaagatttagcacgcgttgaaaaagtcggtgcagctctagaatatggtatggttggtgcaaacgaaatcgctatatccaatccagaaactccatttggtggtgtaaaacattcaggatttggccgcgaaaatggtcattacggaatggaagaatacatccaagtgaaattcattaacttaaaatatcgtgattaaatcaaacgagaatggaactccttcgcatcaagcgaaggggttcttttttgcgtactttcctaccagtaggaaaaaagtatatttgtaagcggattcagtcgtttatataataaaagtaagttaaggaaagggaggatacaaatgaaaaacattttactcatttgtgggtcaggagcttcaagtggatttatggcagcagcaattagaaaagccgcaaaaaaacgcggagaaaaagtaaccgtgaaagcagctagtgagtctcaaattgatgaaagaataaacgaaatcgactatttactcatcggaccacatttagcttatatgttagacgatttaaagcaaaaagtagctgataaagatgttttagtatcagtcattccacaagcaacatacggcacacttaatggcgaaaaagcacttgatctcattttaaatatggagggataaaacgatgaacaacaaagtgatggattttatgacaaataaatttgctccaaaagtaaataaagttgttaaaaatccttgggtatcagcaattcaagatgcaattatgtctgcgcttccactcgtttttgtcggttctttagtaaccatcgtttcacttcttaaaaatttatttccaggtatgccagatttttcgatgataagtaatttttcgtttgggatgttcggtttagttgtagcatttttaatcccgtattatctgatggagaaaaaaagggaatagcagtcaaaaattaatttccggagctactggacttgtattatttttaatgttactatttccgactatttcagcagatggagacgcggttttcattttatctagatttggggcaactggaatgttcttgtcgattacaacgggactatttgttggttgtgtaatgaattttgcggcgaaacgttcgctcttcagtgaagatacgccaatcccggatttcgttgtcggttggtttaacagtttactaccaattacttttattttaatcgttggttggttaattacagttcaatttaatattgatttctttgaagttattgtggctgtgtttagcccactcgcatcgattgtacaatcttatccgggctttgtgctttcggttttcattcccgcttttctttatacattcgggatttctggatgggtaatgatgccagcgatttatccagtttatatggcaggactcgcagaaaactcacaagccgtagcaaatggcgcaagtgcatcaaatatcgcaacacaagaaacagtgtacgctttaatttcaatcggcggggtgggtacaaccttatcactttcgattatgatgctgattttaagtaaatctttacagctaaaagcaatcggaaaagcagttattgttccgtcaatttttaacatcaacgaaccattattcttcggagcaccaattgccttcaatccatacttaatgattccaacgtggattaatgctttcttagttccaagcatcgcctatttcgttatgtcgatgaacttagtgagtatccccgcgcaatcattcttgctatggtacatgccttacccagtaacatcttatctcgcaacacaagacttccgcgcggttattgcttgtctagcgattatcgtcatcacatggctcgtctatctgccattctttaaagcatacgataactctttattaaaacaagaaaaattagatgcagtagaagcagagaaagaaatggtaacaaattgattggaggaactaaaatgtcagagcaagactatgttgaagaaacagatagtttaaatgaactatccatgaatattttaatccatgcaggaaacgcaagaaatgatttagtaaaaggtctcaatcacttagaagaattagaatttaacgaagccgaggaattaatcgcctctgccaaaaaagaaattgtcattgcgcatagtctgcaaacagatacattacaactagaagcttcaggcaaccaaatccgctattcaactctattctgtcatgcccaagatactctaatgacagcaaaaagtgaaatactaatcggcgaacatatgctacgtttattcaaaaaaatgaccgaacttacgaaaaaataggaggtacaagtatgtttgaaaattatcagtttccaaaagacttcttatggggtggagctatcgcagccaaccaagcagaaggtgcatttaaagtagatggaaaaggaattagtttagcagatttacacaaatatcataaaggtaaaacaaacgatgaaattagcgaagaacaacataaaggcgtaagtttagctgatattaaagcaagtatagaagataaagtaaactattatccgaaacgccacggtattgatttttaccatacttatccagaagatttagctcttcttgctgaaatgggttttaaaacatttcgaacttcgattgactggacgcgaattttcccaactggagaagaagaggaaccaaatgaagcaggtttaaaatattacgatcaattaatcgacaaaataatcgaacttggtatggaaccaattattaccattttgcattatgaaacaccagtagagattgtcttaaaccatggtggatggcataatcggaaagtcatcgatctgtttgaaaaatacggcaaaaccgtccttgatcgttacagtaaaaaagtgaaatattggattgttattaaccaaattaatctaatccaatttgaaccattcaactccactgccattccatatgatgctgtcgatgattatttatcagcaacgtatcaagcagttcataatcaatttgttgctagtgcgaaaatttatgaatacggcaaagcgctgaatccagatttaatgattggtacgatgctggcagattgcacagcctacccatactcatgtgacccagacgatattgtgcttgcaatgaaacgtaatcggatggaatatttcttcgcagacgtgcagttccaaggagaatatccacaatatgcacttaattatcttgctgaaaataatattacaattgaaatcacagaagaagacaaagctattttacaaaaaaacacgatggattatctagcactttcttattattattcgcaaatggtcgattccaagaaaaatgatttagatcccgcttcgattaccccaaatccgcacttaaaagcaaatccgtggggctgggctgtggatccgaaagggctatataatgctctgtcacaatactgggatagataccataaaccaatcattattgcagaaaacggcttcggaatgtacgacgaattagacaatggcgaaatccatgatgattaccgcattgattatttatctgcccatttaaaagaaatgaaacgcgcgatgtatgacggggtagaagtgatcgcatattgtgcatggggcccaattgacatcgttagttgttcttccgcgcaaatggaaaaaagatacggtttcatctacgttgatttagacaacgaagggaacggcacaggcaaaagaattaaaaaagacagcttttcatggtataaaaaagtaatagagtctaatggggaagatctagaagtttaatgtaacagaagcgccagttgtggtagttgatagctaaaacaactggctttcgatatatagggggtaacaggaatggatactcaaaaagaaatactagcttatttgtataaacaagaagacaagtgggttacctcaaatgagttagcagatttttgcaagtgtacaacaagaaccattcgcaataatatctacaaaataaatgaagcaacgccaaatttaattaattcaaccaaacaagggtatcaaattaaccgagcgattcacttcgattttcaagcagaaagcgacgtttcagaacggaaatccaaattattactagaattaattaaaaactccaccaaaggcgttgatttatttgatctcgcagatattttatttatttcagaagtcactttaaaaaaagatattcaacaattaaaaaacgaactaaaagaagcaaacgtacagattgtcattgataaaaatcaaattaaacttgtcggaaaagagcgcgccaaaagaaagtatatgatttctttattatatgaagaaggcggctaccgtgaaagcatcaaaggccacatccaagaaatgctagaaatagtttcgattgataaactccaaagtatcgtaaaagaagttctagcagaagaagctattacaactaatcaatattcgatgatgaatattgtgttgcattacgccatcagtatcgtccgcatccaacaaggcaatacgctcatcgaaacgcaaaaaacgcttattagaaaacactctaaagaatatgaaatctcaaaaaaaatagccggaatcctctcagaagaataccaaatacatttttcagaagcagaaacaaaacaacttggccttctgtatgttgggcttcaaaacgagcaagcagccaatgccaaccaagctgaattagaacaatttgtcgataaaaaaatcattgaagcacttaaaatagtactcaccaacgtggaagaaatgtatctcattgatcttcaaaacgagcagctttttattaaacttgccatccatgtacaaagcttatattaccgttcgcgttacaaagcttatacaagaaatttaagtttacttgatattaaaacctcttatccagtaacctttgacatcgcagtttacatttcctctttactacaagaaaaactagcaattgactttaacgaagacgaaatatcttttatcgcgctacatatcggttcttttttagaaagcgaaaatcgtgattatatcaaactagaaatcggtattcttgttgacgactaccatgatttaaaaaccaatatgctaaaaaaactacgcaccttatttgaaaacgatgcaacaatagaagtcattgagaatgagagatgcgatgaacactacgatattattttaacgacaaaccgagataccgctctcgaaaaagcaggttcgatttttattcacccattactcacagcgaaagacattaaaaaaattacaagcagaatccataccaagaaaaaaatgcttgaaaacaacctacttggacaacaaattgaccgctatatcgtcccgtcactctattctaatcaaatcgacccctcagaactcacccctcaaaaaataagagaacaaatggtgtctaaaatggaaaaggcggcttttgtaaaaccagattttaaagaaaaagttgaaaaaagagaacaaatggcaccaaccagtttcccgtcaggcattgcgataccccattcaatcaaaaacgatgccattcgcagtggtgtttcgatgatgacgctccaagaaccgatttattggaacgacgtcaaagtaaaaatgattgccctcgtcgccatcagcaaaaaagacgccaatgaatttaacgatttctttgaaaaatttgtggaaattgtttctgaaccaatcaacgccaaacgcttatcgatgacagaaagtttcacagagtttatccaaaaactaaaaatgatggtggaagaaagtgaataattggtcacaaattaagccgtgtaatttaagctgcacggcttttttagcttgaaggatttactaaattgagctataatgtaaacatcaaacgaaaaggagtgttatcttaagccaatgaaattctaatcctgtattatatgaaaaaatgaagaaagctatccaattcttgggtagaaactattttttcggacgggattcgtatgttcatttcgcatgataactctagctatagccttttttggcgtagtttcgcggattcctctctgaaaatattcaggaggttattttttatgtcaataatcgaaataaaccaattaaaaatagaaataggggacagaactttagtagaaatccctcacctgttagtagataaaaaagcaagaatcggcatcatcggtcaaaacggcttaggaaaaacaacgctcatggaagtaatcgctggcgttaaagaagccacatcaggaaacattacttcatacggaaaactcgcttatatcaaacaacttcacactgataaaagcacacaaagcggcggggaaaaaacaagaaaagcaattcaacatgctatgcgccaaaatccaagcatacttttagcagacgaaccgacgagcaacctagatgtcgaaagcgtcaaacatttagaacggcagtggagcgattttcacggtgccctaatgattatttcccatgatcgcgcctttttagatgcactttgcacagaaatatgggaaattaaaaatcaagaaatccacgtctacaaaggaaactatcacgcttatttagaacaaaaaaaactacaagaaaaccaagcagaacttgcctacaaagaatttaaaaacaaaaagaaacaacttcaagcatcacaaaactatcacgaaattgaagcaggacgaattgtaaaaccagggaaacgactaaataacaaagaagcaagcgcctttaaagctggaaaaggcacacaacaaaagaaacaacatagtacaattaaagcgctagaaaaacggattgaacggcttggcaatgtcgaaaaaccacgcactacaaagccaattaaaatcgtcacacccgataatcgactaataaaaaaaggcagtacgatattaagcgcaaaagaagcaaccttcgaaattgcaggaaaaacactgtttgaagcaaaagcattctcgattaaagcaggagataaagtagcgcttatcggtgaaaatgctagcggtaaaaccacttttttaagagaaattatccaagaaaatccaactattacttgtaacaatcaagctaaaatcgcttattttgatcaagaattaaaagggttagatttagcgaagacgctcatagaaaacatcacagataggagcgttcaaacacaacaagtaaacagagatgtgcttggaagtatgcattttaaagaaagtgatttgcataaagaagtcgggatgctttctggtggagaacgagtgaaattacttcttagtatgcttcttgttagtgatgcgaacttcctgatactcgatgaaccgaccaactatttggacatctatgcaatggaagctctggaaatgctcataaaacaatttaccggaacagtgttatttgtttctcatgatagaacgtttgtaaatcaagttgcagaagaattactcgtgattgaaaacaaccaaatgactttccacagaatgaccttctcagaatacgaagaaagtaaagccccaagtcgtgtaacagaagaggataaattgattttagaaatgcgaatgtcagaaattgctgcgaaacttatgcaaccgaatttaaaaccagcagaaaaggcaattctcgaacaagattatcaagaaattatcacaaaaagacaacaatttagttagattgttgtctttttattcgtgcaaaataaaaaatatagtcatttatcttttacttgatttcttcaaaagataggcttagaatcaaatagttattaaaaagagtaaagaaagaaggaatcctatgtttagtcacttgccggattcattcctacaaatgaataccatttttatttctattttgatagaggcgctgccgtttgtattaattggcgtatttattgctggttttattcaaatgttcatttctgaaaaatttattgctcgcgttattccaaaaaataaattcctagcagtcattgttggctcgctaattggtgtatttttcccatcctgtgaatgtggcattgtgccgatcgttcgtaatctacttgcaaaaggggtaccgcttcatgctggaattgccttcatgctcacagctccaattattaaccccgttgtcttattttccacctatgttgcatttggaagcacttgggaagttccgcttttacgtgttgccgggagccttgtagtagcactcgttgtcgggaatattatcgcttatttttataaaggaactggtttgaaagaaaggtttttaaaatatgaagctgccagtgaaaaagttgctgtcccagctggaaacttagcccttgcaggaggtccaagtggagacgtaacaacaacgaaatttcaagttctagcaacagaaggagctcaggctgaaccagagcacgaccatgcgcaccatcatcacggtgaagagcacacacatgaaaaaatgtcttttagtcaaaaagtttggcataccgtacagcatgcagttgacgaattcttttctgtcggcaagtatctagtttttggtgctttaattgccgcagcgatgcaaacatatattaaaacttcgacacttgtatccattggacatggcccgattttatctattttattaatgatggttctagcatttgttttatcattatgttctgaagcagatgcatttattggcgcttcattccgtagtgtattttccacgcaatcaatcgttgcatttttagtgtttggcccgatgctcgatattaaaaatttaatgatgatgttaggagcatttaaagcaaaatttgtcttattaattgttacaagtgtaacgattgtcgtctttttatacgccttggttatttaacagaaagcaggtgaacacatgtttcgagtttttattttatttggatttggcttttatttgatgcagctacatatttctggtgacatcagtaaatatattaatatgaaatacgcttatttatctttttcagcaatgattgccgcatttttacttgcaattattcagcttattatggtttttcgtgatgaagatattggcgcaaaaacagagcatatggggcatacccatgacggtgaaaatactattttgaaaaaaatcatggtttacggtttactttcttacgcattaattgcgggatttttatttccagtcgcaacacttgattcaaccatcgtttccgcgaaaggctttcattttccgaaaaataatgctgcgggcgatgacccttatgcccaaaaccagtttttaagacctgatacaagtggttattttggcgaaacagattatgaaaaaatgatggcgaaagaaaaagccgaaatcatcgatcaaaatccaatcaaagtaaccgatagcaactatttaatgacaatggaaattctctataactatcctggtgagtttactggtaaagaaatcgaatttaccggttttgtctataacgatgaagtgacaaaagataataatttattcttatttcgatttggaattattcattgtgtagcggactctggcgtatttggcatgcttgtccaaatgcccgaaaagaccaattttaaaaacgacacctggcttacagtaaaaggaacaatcactcaagagtactattcaccttttaaaatgaatatcccgtctgtacaagtagatagctataaagaagtagcaaaaccaaaatcagtttatgtctatcgtaaatattaaatcgctacttgcggatttatgcggcttgagttatccttaaataaagctgtttacgttttcacgaatgaataaaaggatggaacattgaatgaatgattacaaccactactttcatttcccacgagaagaatggcgcaagctggaagtgagtaaggaccaaattttaactgcagaggaactggaagaaatacgtggtttaaatgaccgaatttctttacaagacatctctgaaatctatttaccacttataaaactaattgcaatccaataccatgaagcaatttttattcatggtgaaaaaatggaatacttaaagaaaaaagaatcacgtgcccctttcatcattgccttagcaggtagtgtggcagtagggaaaagtacaaccgcgcgtgtttttaaattaatgctagatcgttggttttctaaaacaaggcaagtcgagcttgtaacaacagacggatttctctatcctaataaggttttagaagaacggggtatcatggataaaaaaggtttccccgaaagctacgaccgcgaccgctttgctaagtttctaaccgacttaaaagcaaataaagaagatgttgaagtaccactttattcgcatttcacctacgatgttttagacgaaactcgcatgatgcataatccggatattgttattattgaagggattaatgtccttcaagctgaccaacatgagagcctatatccgagtgatttctttgatttctccgtgtatatggatgctaatgaagcagatattaagaactggtatttagaacgtttcttcatgcttcgcgaaacagctttccaagacgaaagctcgtatttccacccatatacgaaaatcagtaaaaaagaagcagaaacatttgcgttaggtgtttgggatacaatcaatggcgtcaatttaaaagaaaacatcgagaaaacaaagtaccgagcggatttagttcttcataaaggaacagatcaccttatttcagatatttatttacgaaaataaccgagtgcagatagaaggaaacttcttgatgcgttcggtttttcctttacatttaaaaaaatccgagtacaatggaaagtgagtaatcactcatttttaaaaaggagggaaactaatggcagaaatagcaattgatgtttcgaatttagatgtaaaaatcggcaagaaaccaattttatcagatatgtctctcgaaatagagaagggcgaaatattcggcttaatcggtccgtctggcgctggtaaaacaactcttgttaaaacaatcatcggtatggaaaaagcaacaagtggccaaaccaaagtattaggaaatgtaatgccgaacttgccggtaattagcaaaatcggttatatggctcaatcagatgcactgtatactgatttaacagccaaagagaacctagatttttttgcttcactttattctattaagggcgctgctaaaaaagaccgaatcaactatgcgacgaacctggttaatttacaaaccgatttaacaaaaaaagtgaataatttttcaggtggaatgaaacgcaggttgtctctcgctatttctgtccttgcagatcctgatgttttaatattagatgagccaacagtcggaattgatccagaactaagaaaaaccatttgggaagaactggacgatcttaaagcaaacggcaaatgtatccttgtgacgacgcacgtgatggatgaagccgaaaaatgcgatagacttgcaatgataagaaatggaaaaataatcgccatagggaccccacaagagctctcaagtaaaacttcatctggcaaactagaagatgcctttttagagtttggagggaaggactaatgcgaattttagctatcgttaaacggatcgtcaaccaattcaggcgtgataaacggacgcttgctttaatgtttcttgcgccacttttacttattacattactaacttacttatttgaaggcgatacagtgaagccagttgtcggagtgaacggactttcgagttccatggtaaaagaactaaaagaaaatgatttaacaattaagacttacccagacaacacgaacgcaactgcgaaaattaaagacgctgatcttgacgcgttttttcaacaagatggcgagaaaatcaaagtgacatacgaaaatagtgaaccaagcttaagtaaagaaatcggtttaaaactacaaaaagcattgatggccgagcaacaagttcaagtaaagaaacaagccaaaacaacaggagaagctcttgccaaagctggaattgatccaaactcgcttcccgcacttacaaacagccctgaaaagctaaccatttcaaccgattacgtttatggcgataaagatactagcttttttgatacaattagcccgattttcattggctttttcgtatttttcttcgtctttctaattgccggcatttccttcttaagagaacgaacaacaggtacgcttgaacgactcatggcaaccccaattaaacgtatcgaactagaactagggtatttgataggctttggcatatttgccttactacagtctatcttagtcgcagttttctccatccaagtgcttggtatgatgcaaaacggatccttattttatgttttactcattacgctaacactcggaatggtgtcactcgcactaggtatcttactttcaacgtttgctaataatgaatttcaaatcgtgcaatttatccccatcgttattgtgccccaagtgttattctgtgggattttcccgctcgatggcatggcagattggctcgtatggattgcacatattatgccgctatactacggagcaaatgcactaacatccattatggtaaaaggagaaggatttgcctcatttgcaaatgatttttatattttactaggatttgtaatcatcttcgtcgtactaaatatttttgcattaaaaaaataccggaaagtttaattagaaaggaagaataaaagtggatgcagaaggagatatcttgcgtcaaatgcttgatttgacggaaaaagaaactaaaatgagcgataaacaacgccgaattgtagcagcttccattgaactgtttgcggaaaaaggctatgctggaacatcgacaaatgaaatagcaaaaaaagcgggcgtagctgaaggaaccattttcagacattataaaacaaaaaaagatttattgatggcaatcacgatgccaacattgattgggggagttatcccatttttagctcaaagctttgttcaagaagtttttgaaagtgagtatccagatttccagtcgtttattcgcgaaattattgttaaccgttttgaatttgcgaaagagaatggtaaagtcatcaaaatatactttatggaattattttatcatgatgaacttagagcgcagttttctcaaatttttatgacgcatgtaaaagggcagtttgaccaaatgattgatttttataaggcacgtggagaaattgtcgacatgccaaatagcacgattatgagggcgcttattacaaatatagtcggctttatgttgacaaggtttgttgtgatgccagatgctaactggaacgacgcaaaagaaatagatgatacagtttcttatattatgagaggcttaggtaaataaaaaagagtccagcattagctggactctttttttatttagtagaagaatcagttgatttcttcttattatagttgtatttacttggatctacttttttgaagccatcaggagcatagaatcgtaataaatctccttgtaacacagaatcagaaagctctaattctttggataccttctcttttgtttctttcatttcttttgtttctgtcgcaattggttcacccgtttgttggttatacatgttaccaccaatcatagagtaagttggtgttatataatcaccatttctaaatggaaccagttgtttatgatcttttgaaagtaagtcagtaccaaattgcaagtattctttgttatccacaccaagtaagtgaagcagggtaggtagtaagtcaacttgaccaccatattgttcttggactccaccttcaacacctggaacatgaatcattaaaggtacacgttgcgcttgggcattttcgaaagtgttatagtctttgccaagaatttttgtcattgcttcttcgtggttatcggaaataccataatggtcaccatacataataattacagagttatcgtaaagaccagttttcttcaagtaatcaacaaagctcttcacagattcgtctaaataacgagctgtttggaagtacgtatctaccgaagaatcaccagttgtcgctggagcaatcgaagcatccttctcatcaattggataagggaagtgattggttagcgtgatgaatttcgtatagaatggctgtttcaaggatgaaagatatttttcagattcttggaagaaaggtttatcttttagaccatagttagaaacatccgcgtcattcatatcatagtaactagcatcaaagaaattatcgtaaccaaattgtttataaatttcatcacgattccagaagctcttatagttaccgtggaagacagcactagtatatccttgttgacctaaaatagctgatgctgattcataagtgttttgtccttttgtagtaaaggcagaaccttgaggcaagccataaagcgagttctcaagtaacatttcggagtcagctgttttaccttgacctgtttggtggaagaagtttgtaaagctcagtgtatttttatctttaaagaaagagttaatatacggcgttacttcttctccgttaagtttataattcactaagaattgttggaaactttctaaatgaatataaataacgtttttgccttttgctttaccgaaatattccggatttggcgcggcgtattttgatttagtgtagttaagtacttccgtaacatcactactatcagcaagtgcacgctgtgtagatgactcagtacttttcactgcatcatagatttggtagttagtcataccaagatattttacaatataatttctatcaaaagttcttgttaaaagttgtggacgatcgatttcagcaagtcctaagttagcaaagaacatcgcgataccaagcgttaaaacaccaacaacttttctagcacggattcgagcagttttatcaggttttacaaagcggaaagcaagtagtgcaattaaaataataatatccgcgaagtaaataatatcgtgccagctgagtaacgctgtgatactactacccatgtcgcccatgttttgcatttgttttgcgtttagattcggaagcgtaatgaaatcactaaagaatcgataatagacaatatttgcgtaaagaataaagctcattaaaaagtcaatgacaacgatccagataaatgaacgacgtcctttagcaaaaagtgcgagacctaagaagaaaacagccccactcaatggatttatgaacagcaaaatttgctgcataaggttctcaataccaagtttaaattcaagttgatatgcaatatacgtttttagccaataaagaatgacggctagaacaaaaaacccataatttttgcttaaaaacgtttggatttttattttccaatccttcatgaaacacctctcctacacactatttactcgttttaattgttgtttttgaaatgaaaaaaagaagctgtaatatgtaaaaaaacaatttcatacagcacccactttaacataattctaacacaagattaataaaaggcaagttataacacatacgtctgaagtaggatttattaacaaataggcttatttaactagtcaaaaaagaaccattttggatagaattctgctagaataaaaagtgaaataggaggtataaaatgaacgctaaaatcactccaactttttttgaaaatagaaccactattgaattagctagagatataatagggatgagactcgtgcatgaaataggtaattatactctttctggttacattgttgaaacggaagcctatctcggggcaacagatatggcagcccatagttttaaaaacttacgaaccaaacggactgaagtaatgttcggcactccaggaacgatttatacgtatcaaatgcaccagcaagtattattaaactttattacgatgcgagaaggcattccggaagctgttttaattagagcattagaaccaacgaaagagtccatcgaacaaatggaacaaaatcgttttttgaaaactggctttgaattaacaaacggcccgggtaaattaacgcaagctttaggattaagtatgcaagattatgggaaaactctttttgatagcaatatttggttagaaagggcaaaagtgccacatataatagaagcaactaatcgaattggtgttccaaataaaggtatcgcgacccattatcctctaaggttcacagctaaaggaagcccgtatatttcagcgcaacgtaaaagacaaatttcagcctatatttgggaataactttaaaaatttgtcacaggtgcaaaaatacttcaataaggcggctgatttcctttgcttcatcagagtagctactatataataaaatagttacaaggaggaataatatgttaaagaaaacaatcgcaatcgttattttaatcatcggtttactattaattttttccccattcattaaaaacggcattgtaaaatatatgagtggccatgaaacaatcgatcaatacaatgcatccgatttaaagaaaaacaatgacaaagacgctacatttgattttgaaagtgtacaacttccatctatgacctctgtcatcaaaggtgcagcagactatgacaaagatgccgttattggctcgatagctgttccttctgtagacgttaacttactagtatttaaaggaaccaacactgctaatttacttgcaggagcaacaaccatgcgttctgaccaagtaatgggtaaaggcaactatccattagcggggcaccatatgcgtaatgaatcaatgctatttggcccaattatgaaggtaaaagaaggcgacaagatttacctgactgacctcgtaaatttatatgaatatacagttactgaaacaaaaacaattgatgaaacagaagtaagcgtgatagataatacgaaagacgctagaatcacattaatcacatgtgacaagccaacggaaacgacgaaacgatttgttgcagttggtgagctagataaaacagaaaaactaacaaaagaactagagaataaatatttccctagtaaataagtaaaattttaaaaaggcagcggattttcttagctgtctttttttctggataatttctccttttattataaatgttgtatcatataaatgaggtttattttgagaaaggaagtgcagtaatgaaactaaccgtttttggacattggggcggatatccggtagcgaacgaaggcacatcgagttatttgctagaagaagctggatttaagttattaattgatgtgggggcaagtgccgtttccatcatgcaaaacttcattgatcctgatgacattgatgccgcaataatttctcattaccatccagatcatgtagcagacgtagggattttgcagcacattcgtttgttgtcgcaaaaaaaggaaaaaccacctgtcttacctatttacgggcataaagaagatgaacgtggctattcttatttagaaatggcgaatgtaacaaaagcagtggagtataaagcagatgacacacttgaaatcggaccgtttaaagtaaccttcttaaaaacagtccatccagtaccttgttatgcgatgcgaattgaagcagctggaaaaatctttgtatacaccgcggatagcgcttatcaagatagttttattccttttgcagaaaacgcagatttactcgtaacagatacgaactttttccatgacttagctgggaaaacaaaagttcatatggcaagtaccgaagtcgcaaaaattgctaaagaagcaaatgtgaaatcgttactccttagccatttgccagaagttggtgatttagaagtattgaaacaagaagcagcagctatttacaccggagaaattgcactcgcatcaaaaggatttacgaaaacattttaatatagaagaaaaggggttaggggtatgtattttatagataataataatgaaaaagatccgcggattaatttagcagttgaggaatttattttaaccgaattgaagttagatgaaccggttttacttttctacattaataagccatcgataattattggtcggaatcaaaatacggtagaagaaatcgatacagaatacgtcgagaaaaatgatgtaattgttgtgcgtagactttcaggtggtggcgctgtttatcatgatgaaggtaacttgaattttagttttattacagatgacgacggtgaatcgttccataattttgcgaagtttacacaaccgattgtggaagctcttaaacgtttaggcgtaaatgcggaattaaaaggacgtaatgatttattaatcgatggttttaaagtatcaggaaatgcgcaatttgcaacgaaggggaaaatgttctcgcacggtactttaatgtatgatttgaacttagataatgtcgctgcatcactaaaaccacgtaaagataaaattgaatcaaaaggaattaagtccgttcgtagtcgagttgcgaatatttctgattttatggatcaagaaatgactaccgaagaattccgcgatttattattgctttacatttttaacgtggataaagtagaagatgtgaaagaatacaaattaaccgctgcagattgggaaaaaatccatgaaatttctgctaagcgttatggcaattgggactggaactacggaaaatctccaaaattcgatttaacacggacaaaacgttttccagttggagcagtcgatgttcgcttaaacgtacaaaaaggagttatcacagaaattaagattttcggtgacttctttggggtaaaaaatgtggcggatattgaggagaaattagtcaacacaacttataaacgtgaagcattggccgaagctttagcagatatagaagtaaaagaatactttggtaacattacaaaagatgaatttttagatttactttattaaaaaaagaaagcacgcattccgcgtgctttcttttttatttaaggttttttcctgacatccaatgttccagccgttttccgacaaaccataaaataacgacagaaacagctaaaatagccagtttaagtggttggtgaattaagtctacgaaatcataaccaatatagctaatcgcaaagactttgattaatttcccacctacaagcgctaagataaattggtaaacttttattttagagagacctgcaacgatatttacagcagaagatggtgtaaaaggcattacaagtaaaatgaaaatcggactaaaaccatgtctatcaatccattccattactcgtttaatttgtttatgtccggaaataaatcgcaaaaatcgagtctgcccaaattttcgagctaacaagaaaacacataaactacctgcaattgcagctgtaacggatattaaaaagccgccaaacagtccgtatgcattaacgttaactacaacaaaaacaataaatggtaaaaaaggtaaaaacgcttcaataaaaggtaagaaaaaagctaaaagtggacctaaatttcgatactcacttagccagtacattaaattatcataagaaaagaaattcatcatatcctgccaaaatgtcataagcaagcctccagtagtctttaaaaacatactttattttctcacataaaaatgataaagcgctaataaaacagcttgaatatagttaaaatcctagtaaatctaccaggattttaattatttattatttttacaaagaaattccagaaaaagtcttgtcaaaactaacatagaatggtattatataaaagttgttaaaacactaagaactacttactgtgcgggtgtagtttagtggtaaaactacagccttccaagctgttgtcgtgggttcgattcccatcacccgctttatattttttataaatcctgttatcaacgcagtgtttcgacctttctaagcgaagcattgcgtttattttattgcctgaaaataaggaaagggggaatgatgatagtgaagccagaatcaaattacgcagcgctaaaagaagagctaattgcttatgcacatgaaattggaattcaaaaaattggttttacgacagcagacccttttttatttttaaaggaacggttactagaagctgaagcgttagatctttttacagggtttgagcatccggttattgatgagcgtgtttatccagagcttattttcaaagaaccccagtcgattattgctattgcgcttgcttacccatctaaattaaaagaagcgcctaccagcaaaaaagaagcaagacgtggcgtttttgctagagcttcgtggggcatcgattatcataccgttttacgagaaaaattagctttactggaacaatttttaagtgaacgtttgcctgatgtacgaatgaaatctatggtagatactggtgaattatcggatgtggctgtggcagaacgagctggcattggttggcgcgggaaaaacacgctgcttataacgccagaattcggctcttgggtttatttaggggaaatgataaccaatattccttttgaaccagatacgcctgctagcgacttgtgtggcagctgcaaccaatgtgtaaaagcttgtccaacaggttccttgttaggtgaagggaaaatgaatccgaaaatatgtttaagctacctcacccaaacaaaagactttctagatgaaaaatatcgcgaagtattgcataatcgtttgtatggctgtgatacttgtcaggtagtttgtccatataatcgcggtcatgattttcattttcatgaggaaatggagccggacccggaacttgttcgtcccgagttaaagccactgctacatatttcaaatcgcgctttcaaagagcagtttggcgatatggctggttcatggcgcgggaaaaagccaatccaacgaaatgcgataattattttagctcgttataaagataaaaccgcagtaccagacttaattgattgcttggaaaatgatccgaggccagtcattcgcggaaccgctggatgggccttacgtaaaatcggcggggaacaagctgaagaagctgtccaaaaagcgctccaaaacgaacaagatgaacaagtactccaagaattaacagcaataccaaattaatagaaaccaggtgaaaagaaatgccaaaccatatcgtactatatcaaccagaaatccctgcaaacacaggaaatatctcaagaacatgtgctggaacagatacttatttacatttaattcgtccacttggtttttccacagatgataaaatgttaaaacgcgccggactggactactgggataatgtgaaactttcctattacgattccctagatgagtttttcgaaaaaaatgctggtggagaattctactatattactaaattcggacgccatgtttatagtgacgttgattatagtgatccaaataaaaattatttctttgtttttggaaaagaaactactggtttgcctgatgaacttttacaagcaaatgaggaaaattgtttacgaattccaatgactgatcatattcgatctttaaatttatctaacaccgcagcagttttagcatatgaagcgttacgtcaacagagttttggcgcgcttttacaagaaccaaattacgatcggaaaatctttaaagactaagggggagttagggtgaatcaggcgatagatgccattttaggtcattattcagtacggaactttgaagataaagctttaacagaagaagaattagctttacttattaaaagtgcgcaggccgcatctacatctagttttgttcaagcatactctataatcggaataacagataaaaaaattcgagaacaaatttctgctattgcgggaaatcaaccatatactgtacaaacagggcaattatttatctttgttgctgatctagcgagacaccaagccatcctagaagaacatcaagtagacacagccgcactagaaacttcagaaaaatggcttgtttccattattgatgccgcacttgccgcgcaaaatatggctgttgccgcagaatcgttaggatttggtatttgctttatcggaggaattcgtaatgacgtagggcaaattgccgaaattcttgatttgccaccatatacgatgccgttatttggtttaacaataggccacccgattaaaggcaaagaaaaagccaaacctagattaccgcaagatttggtttatcacgaaaatacttatcaaaaaatgaatccagcaactttagcagaatacgatgaacaaataaaaacttactacgatgaacgaacagcaggaaaacgagtagaaggctggtccgagcagattgcacgcgggcttggaagaaaaagccggttagacttaaaagattttttacaaaagcaacatttaaatcaaaaataaaaagagtggtttggcgcattatcgtaatgcgccaaaccactcttttttcagttatttacgtttattcctagccatttgaattaagttccaaataacgagtattaacactactactagcaagatattaattaatccgcccgctacatggaaaataattccaagtaaccaaactgctaataaaacaactataattccccaaataattcctaacatataaaaaacctctttctaatcttttgattgtactcttatatattcccgagtgacaagcctctaaacatgttagggataaaaaaggctatttttttgtaataaaagctaaaagggctttgactccttccgttaccattcgctctgtttcatcaaaatcaccagtgtaataaggatcaggaatttcttcctcttccttgcctgaaacaaaggacatcagtgaacgaagagttacgtctttgtttttattaagagcatttaaatcagctatattattttgatccatcccaataatataatcagcttgttcaaaatcggcatccgttactttccgagcacgcattgcttcataattaataccgtgctttttcaaaacttctcttgtaccacggtgcggtggttttcctaagttccatgttcccgttgccgcagaatcaatttctatttcatccgttaaccctgcattagcaacttcttttcgaaaaagtccttctgccattggagaacggcaaatatttcctaaacatacaaatactacttttaccaattgaattcctccttattcccactctttatataattcagtagtagcactttgatctattccatcacagtccttaagcatcgcgaaaatcttttccacaagttcaggaacaagttttctccggaaatagagcaattgattttcaaaggattgatagacgactatattataggggatttcgttcttttgaagtaaacgaatgagtgtttctaaataccactttttatctggataatcctctaataactctagtaattgcttggtttttttgacattacttgaagcaagaatttggtctagtttttttactggaaattgttccgcgaaatctactgggaaggggctgaaatatagtgcctccaaaaactcagccatgttttctgcaacaactaaggtctgtagcgtttcaaaatcaacatatataatgctaggcagagacttattatcagcataagaaaaaccgatatagcgcgattcatctcggtgaaaataaacttgttttcctgcaagatcgacatcattttgttccggaatgtccgttaataattcatttaaactagctaaataataaatttccgcgacatcaagtccgtaagacgttggctcgttcgttggaaaatggttttttcgaatcaatccaccattttgcttcaaaagcagctctttatattcagctggtaagaataaacctagttccgtttcttttgcagaaatctcttgctcagttgcagcgttattcccgtttctaacccaaatcgtcatcatcttcaactccttcctgtattatcctaaaaaatactaaatagcgcaaataaaagaacataactagaaaaactagctatgttccaaatgttacttcaaacgatcttgataataactattttcatttcgtgcatcaaattttgcggttaaagtttcggctatttccaccaagtctgtttctgtttcacgatccaaaagaggataagcagcttgtaaaaataataatcgatctagtccgctttctgatttaagaacgatttctttattcgtatcaatgacttctctagccttttcagtttggtttgtaagcactagatacttaagcaaatggctaagtggtggaattaatgaactttctttctccacaagagggtagcctttatcaaaacattcttgcgccattttttcatcaccaagttctaaatacgctaaagccatatttccataagttaaatgaggaacttctgcgcagctctgtttccctttaataattggagcagcagctttcttcgctttttcaaaatctttgataaaacagtaataatgaactttatcatttgtttcgcaagcagggcagtcatttaaataatctgctttggtgttattccatttttcaaagagttcttctgccttgtctttttcgcccattcgaatggcagcaagggtacaaactttatagtaagggcgcaaggaataattttgctgttcgaattttactttcatatcattcaaaagcccatctatttgcgctttggatacttcatcaaaagttgggacatgttcgctaatccatttatatttccaaagtagatcgtaagcgtcaatatatgccgcatcatcttcccatttttttactaaccaactaaaggcttgtaattgtttttttggaaatccggcagttaagcaagtatcaatcagcatatcgcgtgcctcaataccattttctacatcgttatacatatctgcgcttgcaattgcacgctcaagaattttcactttttcagcattgtcgtccataccccaagcttcttcaatatcattcaaataatccatttttttcctcctatagcatttctaagattcgtaacatattttgattcattaagtccatttctttccgtttgagtggataatgtcctaacagtaaagcctgaatataaagaacattaacaatcaccgataactcattaatagatttaccagacgtgaaaagttttttataagctcattatctaaatttaaatacaaatgggcaagtggagcaggggcttgttcttgctgaatactctctaaaatatcactgaaaacagaactcgtttcttctaaagagcgttccagttctctgcttgcctgtgtagcggcagaatgaataaaaataatagggagcgttttaggttcaaaatgcttaattgttatatcggcatcaaattccgccatcattttattcatttcagctaagattggttgataagttatttcttcttcagcagacattggtaacaatttgttagtgatttcttctggttgaattaaaataaactcggcttcatctaccaaatgatttaacattgttaaaattggtgtatcgtaggagtaaccgccattaatcaatgtcataccactagagcgagcaatatcagttatctgtctaaaatcgtctactgaaaaagtatagtagattgtcgtcgtttctttcattatatctgctaatttttcttcaccattcaaagttttaaacggcagataagaataaattaattttaaaaatggcgcatcttcactagctaatgctttaaaaccaagataatgcgtcgataataattttgttagtgcgctctcgggtaacgtttcaattcctttttttagcgccacacctagctccttagatacgatttcaaggcgctcatttttataaaaagattcccgtgaagcgactggctgaagctcatctgtccaaagtatacattcagcaaaaaaagcccagttaggaagaacgttattcgcttcgctcgtcacatacatattgtttaaaaataccgtttgtttgcgcaccgcattcatttgcaccgtataaggaatcataaaagcgattccaaaagtacgaccagattcattttcaattaagaaataatcttgaaagcgagtgccgagtaaatgttccccgtagcgaagaatttgctccctcggaagactgaacagtatttctttatcagcaaactgcttggtccacgagttaatctcttgttcataaccatctgcttctattaaaatggcgctttctaaagaagagccgtatttttttaatgtattaatcaagtattccgttttttcgcattcagggtgttcatccatatgaggacgcaaccgtaaataaacttgagtaccaggttcgcgtttttcggttttaattttacggacagaataagtaccatcagcttttccatgccattcagtcgtttctccgtttttttgtgaggtagaaatcattacaatctcatcgctaacaataaaacaagaaagtaaaccgatcccaaagcgaccaataaaatcattggtatcttgaccatcaaagtttttttcacctttagatgaattagcaatagttgcaaggaaggcatggacttcatcttccgttaaaccaatcccattatcctctaaaattaaagttttgttgtttttttcaccagataatgaaacatggatttttccatttaaagtaggctctattttcttcctagctctaattgcatctgtagcattctgtaataattctcgaatataaacatctttttcgtcataaagatgattagagagaatgtcaatcataccagccaagttcacctgaaagcggtgagaataattttccattgtctatcctcctagttgtgtaaatatcatttttattctatcataaaagaagagataaatattggaaaaacattaatagatgtttaaaaaatcatatcagtggtaaatactttgtgatggtttccacactggacattgtagtggaaatagattatacttattattaagtgataatcattacaaaataggaggaagataattatgaaaacaatcaactcagtagacacaaaggaatttttgaatcatcaagtagcgaatttaaacgtattcacagtaaaaattcatcaaattcattggtatatgagaggccacaacttcttcactttacatgaaaaaatggatgatttatatagcgaattcggtgaacaaatggatgaagtagcagaacgtttacttgccattggtggaagcccattctcgactttaaaagagtttttagaaaatgcgagtgtagaagaagctccttatacaaaacctaaaactatggatcaattaatggaagacttagttggtacattagaattacttagagacgaatataaacaaggcattgagctaactgacaaagaaggcgacgatgtaacaaacgatatgctaattgcatttaaagctagcattgacaaacatatctggatgttcaaagcattccttggaaaagctccattagaataagatgcaatcaaaactgtgtgggatttatttctcacacagtttttttacctcgaatctgttatagtacaatatccttattttaaggttgttttaatacatagtggtttgaattttattagaaagaggtatactaactgcataacaaaaagcagaaaaagtgaaattcgatgtaaaatctgctattcttgagtaataatcaatacgtacaaaaaatggaaacgaggagtgaaaagtatgaatatcgaggtaacggaccaagcaaataaatggtttcatgatgaatttgatgtagctgatggtaatggaattcgactttttgccaaatatggtggttctaatagttccttgcatcctggtttctctatcggtttagctgccgaaaaaccgcaagaagcagcagtcgctgaaaagaaagaagacttaactttctttattgaagatcatgattattggtatttcaaagaccacgactggaaaattgactatgaaccaaaaacggaagaagtatccttttcctttaaagaaaaagtgaaatgaatacaacataaattgccgcgtgtaaatcgattttgatttcatgcggtttttgttttaaaagctttactgttctctattcctttgctattctactaagagagcaggaggagaaagatgacaaagaaattagtaatttgtattagtttaatcgcgatatttttaagcggttgtagtttttcagaaccatccactaaaccatctaacatcacagaaaaaaccttaaatggtgcaagctttactttttttgatgttggtcaaggggacagcacacttattcaagcagaagacggtacgactattttgattgatactggtcgacaagatgatgaccggattttaacttatttaaaagaagcaaatataaaaaagctagatttgctattactgacacatccacatgccgaccatattggtaatgccgacaaagtcattgctacatataaaccgaaagaaatttggatggatggcttaactttttcaagcagtatttatgagaaggtaattgatgcagcactggcctcaaatgcgaaatataaagaaccaagacgcggtgataaagcgacttttggtccatttgatatagaagtcctaagcccagataaacttcaaaacgacgccaataatgactccattgcagtcaaaatgacatacaaagatatttctgccattttcactggtgatgcggaaaaagggcgggaacgagaaatggcagatagtggcgccaatttagaagcagatattttagacttaggacaccatggttcatccacttctaatcaaccatttttcttagataaagtgaaacctcaagtggctgtatactccgctgaaatggccaacagttatggacatccccatgtagaagtattggaatggttaaaagaacgagatattaaaacttacgggacagatgtgaatggaacaattacaatcgaaactgacggcgaaaaaattcatgtccaaaccgaaaaagaaggcacccctaagcccggtagcagctataacaaagaaaataatacacaaaaaacagaagatgccacatcagaagaattgcctgaaagtattaatctgaattcagcatctagtgaagaattacaactattaccacttattggcccagcgctggcagaaaaaatcattgccgagcgcccgtatcagtccatagatgaattgaaaaaaattaacggcattggtgatggaattgtgcgccaaattaaagaacaaggccttgccgtaacaaagtaggtgaatagggtgaaaaaagcaatattagatcgtatagaggatggaaaagccgtttttctaatcgaaccgaaccatacagaatggttagtaaatcaagaagaacttgattcctctataaaagaaggggatgtcgtcactatttcagaaacaaatgaaataatgaaacacccccaagaaactgatgaaatgaaaaaacgtattgcggaaaagctagaaagactaagaggaaaaaactgagaaaaacttttttaaactctcatgaaattttcatctttctttcagcacattcttttttaggaaagttattatatgtataagctaacaacaagcaaaacattttcatttctttccctttttagaatgaaaatcccaaactcccttttagctagtgcggtttactccctttttccgcgctagttttttcatgcgcaaaaatcactttttctgtggaaagagaaatttattgcgtccagcatctaggccgcaatatagcataattagggtaatgccgatcagaacatataacgttggttgccaactgccaagagcatcatggagtgtaccaaataatattggaccggaagcagcaaacaaataacctattgattgcgccattccagataaatccgccgattcggtagcgcttgttgttcgcaaattaaagaacatcatcgaaagactaaatgacatccccgaaccaatcccatataaaataatcgcagtagctaaaataaatagattaccagaagcgaacataatcccaaaaatcccaatcataaataataaaacagaaatcccaacgagcaactgctgatttttcattcgcccagctataataggaataataaatgtaatcggcataacagcaaactgcattagtgagagcataagaccgctagaagtacttgataatccttgatctgctaaaatgttcggtaaccaagcaatcgaaatataaaaaatcgcggactgtgaacccatatataatgaaattttccaagcaagaggggacttccacaccgaagtagtaactaaatgtgtggcaattttttctgagctgcgttggttatatcttaactgtggtagccagataactaacgctaaaacacccagcattgcccaaaaaaccatgcttccatgccagctgaatttattattcatcgcaatcggcaccgtcaaaccagcagcaagtgccgcacataaattcattgaaatcgaatataccccagtcattaatcctaatttaaaaggaaactccttcttaatcaaactaggtaaaatgacatttcccactgcaatagcaagtccaatcataaatgtcccagcaaataaatagaattcgcctccaaaaggtcgaagtaaactaccaataacaagagttaaaagtgcgataaaaataagtacttctatccctagtgaacgacttaatttcgaaacaaaaggggataaaccagcaaaagcaagtagtggtatcgtcgttagtaatcctgccatcgtgtttgttaaatgtaaatctgattgaatcattccaagtaaaggtccaactgacgtaattggtgcacgcaagtttgctgcaattaaaataatgccgacaataagcatcacccgacttgaacgcgtcaggatttttttatttgttaaatctgaattcatttgttatctccattcttagcagcaatttgtttgaagagcgtgatatactcagttacttcatgtgctgctccttctttatctcgtttttcgatcgctgatacaagagttgcatggccattatgcttattaacagctggattcatttctgttgtactcgtaatcgaaaactgtatttcctctaaaatatttacatacatatctaacaataaatcattgtgcgctgcctttacaattgttagatgaagagctgaatcggcttttacaaaggcagttacatcattatctttattagctaaatagcaaagttgcttatatttttttagcatttttaaatcttcatccgtgcgccgttcgcaagctaaaataactgcttctcggtctagcgcatgcctcatttctagaatttcttgaacagaggattctcgcacgcgtttttgcataatagcatgaagttcactattattgcgtacaaaagttccgtctccttgctttgtttcaagtaaaccaatatgggccagcgcacggattgcttcacgtaacgtatttcgactgatgccaaactgagtcattaaatcagcttctttaggaattcgttcgccgattttccaagcgccactagtaatttcagcttttatctgatcatagacttgctcagctaaagatttccgctcaattttttctaccacaaaaaaactcccctttctaaaggtaggatgattggttctattctacagaagaaaaatttttttgtaaaccctatttaactaatttatgataaaatgaagaaagaaaagggctggtgaggaaatgaattggttggagaagctaaaagaaaatgacacggcaagacgggtgctagtgtttgttcttctagggattgtattatatttacttagaagcatgatagatttaatattactaacatttatttttgcatttttagttacgcgattagaaaatgtaattttaaaaagaatacgaataccacgaaaattaatcgttatcgttttatattgtttagtagcaatgtttttatatgttgctattgttcatttcttaccaattttaattgaccaaatatcgcaacttgtagactctcttgtaaaaatttataataacccgagtgataataagattgtgcagtggattgtcggatttttgaaggaatcgaatattcaaaaatacctccaaactggtgttgactttattattgcttcactttctggaatcggttcggttggattatcgtttttcttagctttaatccttagtttgtttttctctttagaaaaagaacgggtaacttcttttacagggcaatttttaacaagtaaagtaggctttatttttaaagaagcagcgttttttgggaaaaaatttgttgcgactttcggggtggtgttagaggcacaattgatgattgcgcttgttaatacaatcattacaacgatagcactatatttaatgaatttcccacaacttcttagtctatccataatggtgtttgtattagggttaattcccgtggctggtgtaattatctcatgtgttccacttgttcttattgcatactctgttggtggttttcaagatgtcgtttatattttaattacggtagttatcgttcatgcgattgaaacatatattttaaatccgaaactaatgtcttccaaaacgaatttacctgtattttatacctttatcattttaattttttcagaaactttctttggcgtatggggcttaattgttggtatcccagtatttgtattcttactggatattctagacgtacgaaattctgaagatattcaaaaaagaactatatttggacgtaagaaaaaagtagattaagcttaatgcttaatctactttttcagttccccataaaaaattagctactttggcatctacatctgtattttcatgtagtttactgtgagctgctttttttccagtaaagattttttcttcgtaacttttagcttgtccttcaaaaataaatttaccagagagagcgcttgcgaccgatacactaccatcgcttttggttccgtctagcatatcaccggcaatatttaatacttgtaaattagtagggattttttgtttgtttttcataaattcactataacgatcagaggactgttttggtccttcatccgttaaatcgtaggcagttacaccattatcaccaacaactagcccattaagtggtgcgccaattaaaactagattttcaagaactggataggctttatcactaccaactttctcaatataactcgttaggctaactccgcccattgaatgaccaaccgcatctactttttcaatatgataattattttttaactctttcatcacattttgtatccactgagtttgattaaccatcgaacttttattatcctcaaaaatgacttggatagttggattatgactaaatttatcgtaacttcctgttgtgctcacacttccatcagcagcaacagtcataacaagtgattctgttacgataccatcatcagcaaggcgattaatcatgcctttaaatgaattagctgtccctgaatagccatgaacaaaaagcgttggtacagcaatttctgaaactggatttttagcttttttggaagatttttgtgcagtagcgttagtaggttctttagcagcttttttagtaggttcaaactgaaggaaaattatcccaaagcctgtaattatgatggctaagatgataatcgtgagtataacttttttcattcgaaacatcctttaacttttatttctgcccccataaaaattgaccgacatacttatcaacgacagtggattcatgcatgctactatgggttgctttggggcctttaataacgtgagtaatgactttctgatgtgcaaataacttttgaccatataagacgctatttaatttgacttcgccatcactgtttgagccgtcttctaagtcgccaccgataatcataatttccgtattatcaggtaatactttggccattttttgagcaaacttggcatgaacattattggcatttttaatgtccacttgctgatctccatttacatattcttctgggtaaaaaggtactgcgagaaaaacaattttatttacttgtggataagatttgtttttttcataagatgctaaataggaaacccaagcaccgccacccattgagtgaccaattgcattgaattttttgatgtcataatttttttgtaaataggacattattttttttgtccacatcgattgctgagggagggttgctcggttatcttcaaaaacaatattaattaacggatttttttcatttttactataagtaccagtagtagaaatgcttccgtctggacttacatttactgttaatgactctgtgccccaattatatttttggtcgaagcgtcgtatcattccatgaagtgagcgatcagttcctcggtaaccatgtataaatatagttggaatagcatcattagctgcttttggatatgtcgtgttgatcgtaagtaaaataaaaattgctccaactaaacaccctaaaggtaagacaatcgagaagaacacacgctttagcattattttacgcccctttaaatttcgttatgaacaaattatacatttttttaaagcaaaacgcacgactagtcttctttttctaatatttaaatagtttattctcactaagacatatagtatactggaaaaataagcgaagaaacggaggcatattttcatgattaaacgaactggtgagatagttctcgctattattggacttatttttagtgtacttatgcaagcagctattgctgtcattggtctattacttgtaaatggctcaaaaggaaaagaaggcttaacaacttattacaataactactaccaaactgttaccgaatgggaaattcctaaagatgagataccggacccggatcgtatctttgattttgtacatacattatcttggactgcactttctggcgggataatcactttaattgttggagcagcaggcatttactatattatgaagaataaaaacccaatacttgctggatttttatttttagcagccggtattgtgtcacttttatccactgcacttattggtttcattcccgctttacttttcgttattgcggcaatgctatgttttattcgtaaacccaaaagcactttttctggattctaatatcaaaacgagtttgcatcatgcaaactcgtttttgttttatctcgctttttttagggaataaaatagtggatttcaagaggaggttgatagtgtgaaaaataaagtaggaattattgctggagctgttgcgggtgtagtagcttgtgctgcaatttatgtggtgaaaaagcaacagccacccacgccttttgatgaagtaaatgatattagaacacgctatgcggacaaagaaatctcagaaacagagctagaggaaaacaatatgatttctgaaggcggagtttcatctcttcaatatgaagaaaaaataaaatagccaaaaagcagtttgtatcttgtgttacacgagaagcaagctgttttttgttcgttaaacatttcttaatatgttatcctgtagttagataataggactcaagttgtaggtgaatttccttctacagtgggttcttatacttgatacatagcgttatgataggtacagtaataaaagaaaaatatttcagctacacttggaaataaggaggtagacagatgagagcgattttgattggcgtattaatagttttactcttagcaatgatacttatcgtcttatggccagcaattatggcaactattggcgcagtgctcggcttttggtcacttaagaaactactcgaagcaaggtctgtaggtgaaaaaatcgtttatggtgtattaatcggcgtaggtgccttaatcattctagctaacttaaaaggaatactggttgttgcaatcattggagcaatcatttactttctaactagaaataaaaataaacctagaaaaaatgatgatgtattcgactacccatacaataaataattggaggagaaaaaaatggcaaacctttttgaaaaaatgaaacaatggaataaagaagtaagtgaaaaaatcgaaaaacgtgaagaaaaacgtcgtaattcggtaagttactatatggataaaacaaaacaagaaatgaaagacgcagaacgcatggtagaaaaacaacgcgaactgaaatctcttttctataaagaatataaagaaatggaagtttatgtagaaaaacgccgtcatcaagctgaaattgcaaaagaagctggcgaaactaaattagctgattttgcattagaagaagtagctcaatacgaagaacaattaaaagcaactaaatctcattatgatcaagcttctgaacaacttgaaaaattagaactacgcatgcacgaaatgcgcttaaaatggaaaaatcttaaaacacaacatctagctgaaatggctgaaaaaaatgcgacagaaacttccgaaaaaatggacaaagttatccatgatatgagctggggtagcgtaagtgattatcatgaagctcaaaaacaacgcgacttagctgaagaagctgaaaagaaagctgatatgagcaaagaactttcccaatcttttgatgatctaatggatgaactagaaaagaaaaccaagaaaagcaaagagattattaaagacaaagcccaaaatttcacaacaatggtagatgaaattattgaacgcgaaaaacaaaatttcaagaaaccagaaaaagcttctatggaagatcagttaaatgaacttgaaaaagaggctgctaaagaacaaccaaaagaagaaaaagaagtgctcattccagaattagagaaaaaagaagaagaaaacgaaacagataaataaaagtaacgagcgtagaataatcattctgcgctttttttataacgaaatgctacgggccttttaaatgctcgtggcttttttggttactttacttttttttcgggtaaataggaaaagataagttgcattttaatggatacatgctataataattggtatagaccgatttaacgaggaggcaatacgtaatgactaataaagtaattactaacgctacaatttatactggtaaaggtgttctagaaaatgcttttgtacgatttgataaacagattttagaagttggctcaatgactgactttcaagcggaaaaagcagaagaagtaatcgatgcaaaaggacaaaagttagttcctggtttcattgatgtccattctcatggtggttatagttttgacgcaatggatgcagatcctgaagcacttaaaaaacaagtgaatggtatgttaaacgaaggtatcactacttacttcccaacaacaatgactcaatcacatgaaaatattgaaaaagctttaaaagttattaatgaagtcgctcaaactgaacctgtaattggcgggattcatcttgaaggtccatttgtatctaaagtcttcaaaggagcgcaaccagaagaatacattcaagcacctgacttggaacttttcaagaagtggtttgatatttctggtggcttaattcaattagttacctacgcgccagaacacgatacttcagctgattttgaaaacttgtgttttgaacttggagttgttccaagtattggtcactccaacgatgtgcgcgaacacttaaaaacaagtaaagcgacacatgcgacacatttatataatgcctgtcaccgtatgacgcaccgtgaaccaggtgttccaggccacgttttactcgaaaaaggtattaatgcagaattaattgttgatggtattcacgttcaccctgatatggtgaaattagcataccaaatgaaaggcccagaacatttatgcattattactgactcgatgcgagcaaaaggtatgccagaaggaaaatccgaacttggcggccaaacagttatcgtgaaagataaacaagctcgtttagaagatggaacattagccggaagtgtactcacttacgacgacggtttccgcaatatgattaaatttactggatgcacggtggaagaagcagttcttatgtcttctggtaaccaagcacgcgaatttaatttaacacaaaaaggtgcaatccaagctggtaaggatgcagatttcaacttactagatgaagatttaaacattacagcaacatattcattcggaaaaaaacattcttgagaggaagatattattatgcaacttatcacaacagaaaataaattagcaggttctaaaaaagcactagaaattattgaaaaaggcattacatcaggtgaagtaaatacacttggtctagcaacaggaagcactccagaaacactttacgctgagcttgtaaaaagcgacgttgacacaaaaaatgtaacaacaactaacctagatgaatatgtaggtcttgcagcagacgacccaaacagttatcattactatatgaatgacttattattctctaaaaaagcatttaaagaaagtttcttaccaaacggggaagcgactgacgctgaagcagaatgcgcacgttatgaaggaattttatctgagcatccaatcgatattcaagtgcttggaattggaacaaacggccacatcggttttaatgaaccaggaacttcttttgattcattaacacataaagttgttttaacagattccactcgtgaagctaacaaacgcttttttgaaagagaagaagatgttccaacacatgcttattctatgggaattaaatcaatcatgaatgcgaagaaaattatcctacttgcttttggtgaaaacaaagcacaagcaatcaaagaaactattaaaggacctgtagatgtgaattgtcctgcttctgttcttcaaaatcatccagatgttactgtgattcttgacaacgaggcggcgtcacttctataagaagagggcggggaaatgatcgataaacaatcaggaataccgatttacattcagattcaaagtgaaattaaaaagaaaatggaagatggtgtctggaaagttggcacttctattccagctgaacgtcaacttgctgaaatgtttcacgttagtcgaatgacagtaagacaagccattcaaggactagtcgatgataatattttgcaaagacgcgttggcgctgggacttttattgcggaaaagaaattaaccgaacgactagaagctgtcacaagttttacgaatttgatgttgcaagaagggaaagttccttcaacgcgtatcgtatcgtatggcattcgtccggcaagtacgcaagaacaagaagcgttacaactaccagaaaacagcaatgtaatgaaaattgaacggattcgttacggcgaccgtgtaccaattctttatgaagttgccgccattccagaaaaaattgcttcactgcttacaaaggaagacattatggattccctttataaagcgattgaattaaaacttggtcaaaaaatcggagaagcagaacaaacgatggaagcttctttagtatcagaaaaaattgcgccatatcttgatgtgaaactcggatcaccggttatgaaacttcggcagattacaactttagaagatggtcgaccatttgaatttacacgttctcaatatgtaggtagtagatttcaatttgtagctaggattaaacaataaatagaaagcttgaggcatgctccgtgcgcttcaagctttttttattaaaaatgttcggataatgattttcgttgtctttttgataataaaaaagtataatgagatgagtaaaaaatttgcggggaggactaaccatgagctggatgataatttttatatgttttggtgcgtccgtgttacttacaccgctaattcgaaagatagctctttattttgatattactgataaacccgatcagcgacgcattaatgtgaagccgattcctagtttaggtggcttagcgatttttattagttttgccattggtttatttttacttccaattgaaaacgaattcttatgggctttattgattgctgcatttgtaatggtcataactggcctgttagatgatattatggaatttaaggcaagatataaattaattggtcaaattaccgctgcttttattatagtattttggggcgatattagtattgattttataaacttaccttttggtggagaaattcattttggcattttgagtattccgctcacgattatttggattgtagcaattacgaatgcgattaatctcattgatgggcttgacggactggcagcgggtgtttccactattgctttactgacaattttaggaatggcatttattatgggggatgcgcttgttattatgattgctagcgttttaattgctgggactcttggcttcttaccatataatttcaatcctgctaaaatatttatgggtgatacaggagcgcttttcttaggtttcattattgcggtactttctattatgggcttcaagaacgtcacttttatctctttaattgtaccaattttaattttaggagtaccaatttctgatacagtttttgctattgtgcgccgtatggttacgaaacaacctattgctatggcagataaatcgcacttgcatcattgtttactccggttaggttttacgcatcgacaaacagtgatattaatttacgcgattgcagcattattttccttatttgcattcattttcacgatgtcgaccttgtggggttcgatgatattaattggagtacttttaattttaatcgaagtgctaattgaaacgcttggattagtaggaagcacttatcgaccattattaaacttatttaagattacgaaagaagacaaaatagattagagattagctactttagttagtctctttttttatgccaaaattcttattgagtaacaagtcttcttgtgatacatttatcaagtaacgtttttagtagaaatgaggagaaaaacatggaaatcatagcgacagcagattcaattagtcaagctgaacaattgcttcgcgcgggggtagacagattatatataggtaacagccaatttggcttaagattacctcattccttttctgtcgaagaattacgtgaaatagttcatttagcgcatcaagaaaagaaaaaagtaaccgtagctgtaaattcgttaatgcacaacgaacatatggaagagctaccaacatttttagaccaacttgctgaaatggaagtagatgcagttgcatgcggcgacccaggagcgattatgcttcttggcgaaatggctcgaccgataccttttatttacgatgcccaaacatttgtcactagcgcagaacaaatctcattttgggaaaaacaaggagcagtcggagcggtacttgcaagagaacttactgaagacgaaataaaagcaattgctaaaagtcttactattccagtagaagtactggtttatggcccaacatgcatccatcaatcaaaacgcaaactagttactaattaccaacgaattgttgaaatggaagatgatacctcgaaggaacgtggactttatttacgcgaacctaatgatgaaactagccaattaccaatctatgaggacgaatctggaacgcacatttttgcttcagaagatgtttcactggtaccatacttagctgatttatatgaagcaggcttgaacacttggaaactggacggggttcttgcagattcggataattttgtacaaattgccactctatttgtcgaggcaaaagaagccgttattaatggacaatttgttgcggaatattttgtgaataaattaacggaactacaacctaaaacaagaaaactagatgcaggattttatttgaaaaatccggatgatgtgaagtagggggaatagcataatgagtaaagtattaaaaaaaccagaagtgctagctccggctggtaacttagaaaaattaaaaattgccattcgttacggagcggatgctgtatatattggtggccaggcgtttgggctccggtcacgagcagggaattttagttttgatgaaatgaaagaaggtatcgcatttgcgcatgagagaaatgcaaaagtgtatgtagctgccaatatggttgcgcacgcaggggatacagaaggtgctggtgaatttttccggacactccgggatattggcattgatgcagtcatcgtttctgatcctgcactaattagcatttgttttcaggatgcgccaggcttaccagtccatttatcaacacaagcatctgcaaccaattataaaacgctagaattttggaaaaaacaaggattagaacgcgtggtgcttgccagagaagtaagtatgcaagaaatccaagagatcggcgaaaaaacggatgtcgaaatggaagcatttattcatggtgcgatgtgtatttcttattccggtcgttgtactctatccaatcatatggcgaaccgtgatgcgaatcgaggaggttgtgcgcaaagttgtcgctggaaatatgatttatttgagatagataatggcgtttctaaaaatttagttgatacagacgaagaaccgttttcgatgagtgcggtagatttatctatgattaaatatattccagatatggttgatgctggcgtagatagcttaaaaatcgaaggaagaatgaaatcgattcattatgtctcaacggtagcaagtgtgtatcgccgtgcggtagatgcatactgcgcggaccctgagaattacgaatttgatccagcctgggaagaagaattatggaaagttgcacagcgagagttatcaacaggctttttctataaagaaccaaccgaggacgagcaattattcgggaaaactcggaaaatacctcaatatgctttcgccgctcaagtacttgaatacgacgcagaaacaaaaattgctaccttacaacaacgaaataattttggtgtcggggaagaaattgagttttatggaccgggagatactggttttaaacaagttgtcgaagttctttggaatgaagacggggaagaaattgaccgtgctccaaatgcgatgatgacgataaaaatgccggtagatagacctgttaagccattttactttatgcgaaagaaaaaatagaatctcatgctgcagtaggattgtcgtgtactccccaagtaaggtataatgggattagtacatatgaaggaggagattaattatgataggatggattattgctatcgctgttgttgtaattctagtattgatttatttcggtctatacaacagccttgtaaaataccgtaaccgtgttgacgaaacttgggcgcaaattgacgtacaattaaaacgtcgctttgacttgattcctaatttagttgaaacagttaaagggtatgcaacacatgaaaaagaaacactaacacaagtaattgaagctcgtaacaaaatgatggaagttcctgctgacaaccgtcaagggcaaatcgaagcagataatatgctaagtggggcgcttaaatctatttttgcattaggtgaagcttatccagacttaaaagcaaatacttccttcatcgaattacaacatgaactaactactacggaaaacaaagtggcgtattctcgccaactttataacacaaccgtaatgacttataacacaaaagtacaatcagtaccaacaaacatcgtagcaaaactgcataactttaaagaacgcgatatgctttcgattccagaagtagagcgtgttgcaccaaaagtagagttttaagccatgaaggagagcgaaaattatgctatttgaacaaattgcagcaaataagcgaaaaactgtttttatcattcttggcttttttattttcgttcttatggttggggctgctataggtataattgtttggaataactatctaaatggactcatacttgcggcggctattggtgcggtttatattttgataatggttatgagcagttcgtcggttgtcatggcgatgaatcatgcgaaagaagtcacctcaaaagagcaagcaccagttttatgggatactgttgaaagcatggcgatggttgctggtatcccaatgccaaaagtttatattgttgaagatccaagtccgaatgcatttgcaaccggtatttctcctgaaaaaggcgccgtagctgtcactagaggattgttaaataaattagaacgatatgagttagagggcgttattgcgcatgagatttctcatattcgtaactatgatattcgcttgtcgactattgcgattgccttagtcgcggttattgctatcctaagtgatttagctatgcgtttgattttctggggtagcttaacaggcggaagaaatagccgcaaaagtgacaataataatggcggcggggcacagataattatctatgtagtagcactaatttttgttattttagctccgattattgctacggcgattcagttcgctttatctagaaatagggagtatttggctgatgcaagtgcagtagaattaactcggaatccagatgggcttatccaagcattacaaaaaattagcggtgatacgaaaaaaatggaagaagttagcgcttctagcgagtccatttacttttcgtcgccattgaagtctaaaaaagataaaccaggtcttttcgattcccatccgccgattagttcgcgaattgagcggttggaaaatatgtaataaaaaagtagcagccgagattaggctgctactttttttattataagctaccgatatatttccagtgaggcttgccatctggagcatcgattaattctactttttgttgaaggcgccatttcttcatttggcggtcaatttgttgttcagaaaccccgtaaaaggctgccatggaagcagaagaagtaacttttactttagctaaatattcttccatttgtgggcgctcttctggttctgggaaatcatttaaaagctcggataaaacatgtacgtagacctcataacgatgtaggccacttaattttaacccagcgtcttctatatttttattgaagaaaactactgttggattttcgcgtatttccatttcttgtgctactttttggtcgccaatataggcgcgcttagcagcagtagatgctaaatcttttttgaattcagtaagatctagaccggtggaaatagcgatttcatagagtacttcttcactagcgatgtctttattctcaagaaaataagcttcttgaatcttacgcaggaatgtaataccttgtttttttccttggagttcagcggctttgactgcaagacaagaaatataggaaaggtgcgcccctatttgttgttcttttaagcttaggttactatttccagcgcgtttttgtttacatacaaatgtctgcaaattattatgcaacacatagcgcaatttaaaatagttcccgtactccatttgtaaccggagcatgttcgcttcaatattccaacagtcatcacaagcaggatcaaaaaatagataaatttcgatgggcttggaattagctactgactgataatataaattttggttaatcatttgctatcacctgattttcaaattctaaataccttcaagcagatattcatttcaatgtaccagtgtgaaaagaaataattcactgctaagtaaaagctgatacaaaatttggttttgtaacttacatatctattttatcagcgtaatgtaaatttaacaaataattgtcattggcttaatatatttattcgttattttttaagaatttgtgtcatttcgctataaattagtacgtttttcgttagttagtcattatttttatacacatgattataaaaacgagctactttgttttctgctggatgattcgttatttgatattctttgagtagtttatcaaaaatttcttttcctttatcgtaatcagaaacttcatattctaaatcaaaatctgaaatagaaccatagaaatttttgtcgaatacgagtagtccttttttataatctttttcggcacggattgttttaagcgaaccaaagacttgcaaatcttcatgattaataccgatttcttttaaagtatcgcgcactggaccaactggaatatttgctccgtctgtaatggctgttgcttgatctgcggctaaaatttgagttgtttccattaaaccgcgagcctcaggagtttttagtgttaattggtactgtgtttctaacttacgaatccgaagagcagagttacgttcttttaagccgaaatctgccgtatctaaataaaaattagtttgttcaaaaaaatcatcttctttaattcgaaaatcctctataagtcgatcatattcctcttttgtcaaaagattgcggaattctatttctagttcttttaccatgaaaattcatctcctcttaatgaaataacgcatctaaatcttgtgcataaaattgaatcgcttttttgtaacttaaaatatctttgtcattagttgtatttgttagtaacagaagtgcttcttgtaaggcttctttttccttaccttgattatacttagccatgatgaaaaaagtacgtaaagcattattttctgggaactcttctatcgctttttggaaaagaaggacggctttttcgggagaacctgttatgcggtaggtgctaccaaggccaatatatgcttcttttttatctgtatcaggaagaccaagctccagtgctttctcataaaaagggatagcggcatcttctttaccgagcgcatcgtgtgcccatgctgcaaaataatttagttccgcattttctggggcgttttttaattctgcaagagcttttagtcgagcagtttcgtaatcgccattttgaagtaaagtaagaatcatttccatcatccttttcattgtatcgttagcgcttcagttttattttaacatgtgattgaaaaaaaggttacttttagcaaggtggattaatcacttttgtgttaaaatataactgatgttgcataaatttaatcatgaatatacttgaggtgagcgatttgaatcattgggaagactttttagcgccttataaacaggcagtagaagaacttaaaattaaacttaaaggaatgcgttcacaatttgagcttgaaaataatcattcgccaattgaatttgttacaggacgagtgaagccagttgcgagcatattagacaaagctaatcaaaaacatatcgcacttgaccatttagtggaagaaatgcaagatattgcgggactgcgaatgatgtgtcaatttgtagatgatattgaggttgtcgttcgtcttttaaggcaacgcaatgattttcggattgtggaagagcgcgattatattacaaataagaaacccagtggataccgttcgtatcacgtcgttattgaatacccagtggaaacaattcaaggtgagaagaagattttagctgaaatccaaattaggacattagcaatgaatttttgggcgactattgagcattcggtaaactataaataccaaggcgaatttccagaagcgattaataagcgactaaaacgcgctgccgaggcggcttttcaattagatgaggaaatgtcgcaaattcgtgaagaaatacaagaagcgcaagtctatttttctcaaaacaaagatgtatcaaaggataaaaaagcggtgcatcaagtaatgccaaagaaaaataagtaattaagcgtaggaataggggcgaatagaaataatgaaatatatgattacttcaaaaggggacgagaagtcagatttgctgcgattgaatatgatcgctggttttggggaatatgacatggaatatgatgagatagaacctgaaatcgttatttctattggcggagatggaacttttttgtctgcgtttcatcaatatgaagagcgcttagatgaaattgcttttatcggaattcatactggtcatcttggcttttatgctgattggcgcccagctgaagcagataaattagttaagttattagcaaaaggagaatatcaaaaagtttcttatccactgcttaaaactacagtaaaatacggcattggcaaaaaagaagctgagtatttagcgctaaatgagtcaaccgtaaaaagttcaggtggaccttttgttgtggatgtagttattaatgatctccattttgaacgattccgcggagatggtttatgtatgtcaacaccaagcggaacgactgcatataataaatcactcgggggagcgctaatgcatccgtccattgaagcaatgcaattaactgaaatggcgtcgattaataatcgagtttaccggacaattggtagtccactcgtttttccgaagcatcatgtagttagtttgcaaccggtaaatgacaaggattttcaaatttctgtggatcatttaagtattttgcatcgtgatgttcaggaaattcgttatgaagtatcagcgaaaaaagttcattttgcgagattcagatcatttccattttggcgtcgagtacacgattcatttattgaagattaagctagcaggaggaagcatgtgtttttagaatggcaagtaaaaaatgaagaagatgggttgttgcttagaacttttctgaaaagcaagcacatatctaaacaattattaaccgcagtaaaatttggcgcggatggtaaaattgaagttaataacgaagaacaaaatgttttatatcatgttaaaactgacgataaagttcgacttacctttccaacagaacaacaaaatgatcgattattggcagaacatacagatttagaagtagtttttgaagatgactttttattaattattaataaaccggccggaatggcttcaattccgtctcaatatcatccgaccggttcagtagcaaattttgtaaaaggacactacgaaaatcaagggcttacaagtgctatccatatcgtaacaaggcttgaccgagaaacatcaggattaatgttaatcgccaaaaatagatacgcacacgccaggctcagtagttttttacaacaaggactactcaaaagacgataccaagctttcacttcaggtaccctggaagaagaagcaggatctattgaagcaccaataggacgtaaagatgtaagtataatggagcgttttgttactccagaaggaaaatatgcgaaaacaaactacgaagttctcatgcgttataacgggtttgatcatttagcgatccagcttgagacagggcgaacacatcaaattcgggtgcatttttcttatatcggtcatccgcttattggcgatgacatgtacggcggggatcaggaactacttaaaagacaagcacttcactcttgtcatctacatttagtccacccagtcacagaagaatatatggcgtttgatttgcctttaccagaagatatggaacagataattcaaaaatcgaagtaataagtgttttaaaaagttatttggtcatgtaaaatggaagaagcgaacaaatcgcatcaaaattaggaggaaagaacatgaatttatcattagagggaaaaacatatgttgtaatgggagtagctaataaacgcagtattgcttgggcgattgctcgttcattaaatgaagcaggagcaaaactagtatttacatatgcggatgatcgtgcgaaaaaaagcattactgaactagtaccttcattaaacgaaataaatcaagatccacttattttagcatgtgatgtaacaagtgaggacgctattacagcgacatttgaaacaattaaagataaagcaggcaaacttagtggtttagcacattgtattgcttttgctaataaagattacttaactggtgactatttagaagtagatcgtaaaagcttcttacaagcgcatgaaatcagtgcttattcgtttacagcggtggcgcgtgcgttaaaacacttagatatgttaactgaagatgctagcttgcttactttaacttatcttggcggtgagcgtgttgtagaaaactacaatatcatgggtgttgctaaagcttctcttgatgctagcgtgagataccttgcaatggacctaggagctatcggagtgcgtgtgaatgctatttctgctggaccaattagaacagtctcagcacgtggcgttagcggcttctctgactcgatttcacttgtagaagaaagagcaccattaaaacgtgcaacacaagcagaagaagtaggagatacagcttattacttattcagtaacttatcacgaggcgtaacaggtgaagtaattcatgtggatagcggttatcatattattggattctaacaataaaaaaaatccaggagtagtttaaatactacttctggattttttttggtccattatctggatgacttttaatataataatcatctactgttggtgtatagtttgtttgaaccggtgctttgacaaaatcagcaaggacttggtcgatttttacccaaccgcgccagcttaaatgaataggatcttctaaaaagaaagaatcattttgatattgttctagagagtaataacggaagccttgactctcgatttgttgttttgttttagcatagtaaccatctaagccttgtttgttcataccaatgtagtcaatccatttaccgttgataggaggattgatgaaaataacatcagcgccagcttttttgaatgcgtccattagaagttgtaaatcaccaaattctggagattcatcgtaacgcaaatctttacggctgtcttttagcttaccttcaattggtttgatttttttctggtaatatttttctttcacttggaaaggattgtcaccgatacttttctcaccagtttcttttgctaggtcatctagttgtttataatctaatttttctgggagatcttttagacctttttctatacgatcttgtttagaacctgaaactgttttcgattctaaatcgtctttacgttctaaaattttcagttcgacattaccagcaagttttacaagttttggatcatgaggttttttaggaccttttgcgacgatgttttcaagtaatttctttaaagtagagtcgctttgaaccacttggaatgataataatcttttagctgcatatctgcgttcaggtgtgtttttcgcgtcttcaagtgcaaatttataagcatgaagaggggagaagttagcaccaaacgatggatcagaaacgcctttaggttggaaccattgtggagataaaactacagccacttttttgcctcttaagtcatcaccaagtgcatttacatcaagaaaatggcttaatgattgtgtacccggtcgacctaataggaatggtgtataaccttgatcatatttttttgagactacgctaggatgaaatgggtcgacacgagaaagctctgaagaaccataaattggtaaatagtttccttcttttaaagcttctttctggatgtctaagccttggatgacgtattcgttcatagacgtagcgctcttttctacagtctccgaagacacataagaaaataagctgctaggtccaaatagaacgaaaaggaaaaccgcgaatgcgaccagtaaaggcccaaatgtcatccacagcttttttttcattattttagcgcctcaagttgtgtaataatcatttcaggagtagcccattcgtcgcggtcaaattctgaaacgggtacagtaatatctagtcttgattcaatttcaattaaaagttgaacagttgccattgagtctagtaaaccttcatcaaataatttgatatttgtattttgtactacttcatcagtttctgtaatttcttctaagatttctaatacattttcacgaaaagccatttaaattaccacctttagttagttttaaaaattaattttatctaaaatacctgagaaaatcaggaatccgaaacaaacaaattggaatgtaatgataacgccgattacataagttattttgttttttggatagaacttgtgctttttgttaaagcgttcgattaggtcgaaaccaacaattaaagtggcttgataaagaccataaacgatgtaataccagtgaagtccgtgccatacacccataatgaaaaagttaacaaaatatgcgatataggcgatggtgaacttactcttgaaccatttcttttttgtaagccataagacaaaacgcataaatacataatcacggaaccagaaggaaagagtcatatgccagcgattccagaattctttaatgtttcgtgctgcaaaaggcttattgaagttcattggtgtttgaacgccgagtagataactcactccgactgcgaaggcactgtagccagcaaagtcaaagaataagtacatactgtatgcgtacatataaccaatcaaacttgttgttgtatcaacattgtgtgtaatcgcgatgtctagtggaacaacaaaatgtttgtttactaagtatgcgataatgaatttatagagaaaaccaaggaagataaggaaaattcctcgattcagtaaagcaacataagcttctttactaggcggattatcaacgtcttttttaaagcgacggaaccggtcaatcggtcctgatgaaatagttgggaaaaatagtaagaaattaacaaaatcccatgcgttgtactgtttaattaagttatcgcgtatttcaataatcatttgtgtcgctttaaaagttaagtacgaaatccctaggaaaccaaccattgttacttggtctcctaaaattggaactactttagagattacaagcgggagaatggagagaatcactgctatgacgaatacgccgccatgattctgttttttctcctgcctgtaatggaagtaaagtcgtacgagtgcaagttgccagaaaacaaagaagataaaagtaactccttggactggatttgcagcgaataaaaagtataaaaatactaatgtgacaaaagcgttatatatcggtaatctttttcctaacaaaccagctactatgataggaatgaaaaacagaagaagtactccaaaataaagtattgtaccgtatggtgtgctcacttgttaacctcgctgttaagtgcttttcgatcaattttgccattcattgtcaacgggaattccgttttataaatccattttcttgggatcatatatgctggcataaattcttttaattcgtttttgattgctgcacttagctggtattctttttcaaaatcgtgggaagacgggatgacctgagcgaccaacatatcaaccttttcatctttcattttaggaataatagcgcagttttggatgtaacttactttttttagattgttttcaatatcttcaagttcgattctgtaaccatgaagcttaatttggaagtcaagacgaccttggaagaagagataaccatcttttataacaccagagtcaccagtatggtaggcttggtaacctttgtaatcaaagaatacttggtctgttttttctggttcgtttaaatatccttttgaaacacttgcaccgattaggatgatttcgcctttttcgccttcaggaagtatttcaccagtttcttgatcgacaatatgaagtcgcatatctggtttaataactccaagtggtaggctcggataagcatcaatcaactcgcgtgttacttttacttgtgtaacagcaacagtagcttcagtcggcccgtatgtgttataaatgactgcatctgggaaacggtcaagtagttcacttgctgttttcttagcaagtacttcaccacagaataagaaacgtgttaaattagggttgttttcttggttgaaattatcatctagtaaacataagtctgcaaatgatggagtagaaacccatacatcaaaattttgagcaggtatttcgcgatataaatctttcatattagcagtgattgttttatctagtggtacaagagttccgcctgaaagtaagcttggatataagtccataaccgacaagtcaaaggaaaatggtgcttggtttaagaagcgcaatccttgtcttaacgagaaatcttgtaaaatccaattgctaaaactaactaaattgttttggctaatttgaacgccttttggatttcctgtgcttcctgatgtgtatataatataataattatcatcatttttaacacattcagcagggtctggcacttcttcaaaatgtttttccaaagcatccatcaattggtcttgtgttagaacgggacaacctgtaattgtaaggttgcttggaagctcttctgtgcaaatgaatagtgcaggatctgctgcttttttgatttgttctatacgttcaactggcatagaaacatctacaggaacataagcacgtcctgatttaatagtacctaaaaacgcaataagcattagtggggacatgtgtccgtacacgataataggtttttctttgtcagagtttaaagtatttagtagaaaagagccgaatgcatccgattgccgtttaagttctttgtaggaaagacgtgttccagcatattcatagcaagggaaatccggtgtcttttctgcccatgcatcaattctttcaatgatactcgttgtcataattgatattcccattttttaacagtcctttctttttttaaaattcattgtaaataaatttggcgccttcagggtttttgaaaccataaaaccatagcaacccaagcaaaacagtcaagtaaaaaatagtcttcattgtaaaaattgttgctggatgatgcaaaaatagttttactttattcataaatccacctctttattatttcagttatgttacaaatattaaaattaaactcttaatacttacttactgtaatacatctgtctttaaatgtctaattacatttttgtaaggttagaaaaataaacttactttgaacttaaaagtaggtggcgtataatgaaaatatcgatatcgcaatgctttaatgctaagttgggaggaaaataaatgattaatcaaaagaaaatcgcaggtgaaaaagcgtgtgaatggattgaagatggaatggttgtcggtcttggaacgggaagtaccgtttattatacgattgaaaaattaggggaaatggtgcaaaaaggcttaaacattactggggtgtctacttctatagaaacagaacaacaagctcggacattagggattccgctaaaatctttaaatgatgtaacgaaaattgatgtcacaattgatggcgctgatgaaattaatcaagcttttcaaggaataaaagggggcggaggagcacttttacgagaaaagatggttgctcaagctagttcaaagaatatttgggttgttggggaagagaagcttgtgacagagcttggaaaatttcctttgccacttgaagtgattccttttggatggaagcaaattaaacgaatgctagaaaatgacggggttgaaactactttacgcaaacagtcgtcaggagaaatatatgaaacaaataacggcaattatattttagatattataaatcagacctttactaatccagaagcctggcatgaaaagttagcgggcattcctggggtacttgagcacggcttatttcttcattatgtagatataattatttgcggcaaagcatcaggagaaatagagataataaaaaaatagttatttcttctattagaaagaaataactatttttattaataagttaatgtttttttcatttctttatgtttaattcctgcatctaagaatacatcagagcacgtttcatagccaagtttttcataaaaggggattgctgttaactgggcgcctaattttagtgttgttaatccacgcgttttagcttccagttcaatagcttccatgattctacgtccactgccggagccacgggctattttttgggtgcaaatgcgttcgactttaccgtaaccatcctttacgcgaaatctgcctgtcgcgagcgctgtgccgtcttcagcgtaatcaacaaacatatccaccgaagccatttcatcaaattcatcccattctaatgcaggatctacattttgttcgacaacgaaaacgtcatttcgaatttttagtgctgcttgtttacctagttcatctgttactttttttaccgtcaagttgttccgtcccttcctatgcgcgcatgctttctaaatcaaacgtatttactggaagcataaattgtaaggattctttaataaatggctgccagtatttccagcgatgatcgccgttaaatacgcggaaataataatcaaacccacgagaggttaaaatttgttctaaagatttgtttggtgatagaaaatcgagtatttcatctccagtagtttcaactgcagtttcttggtcgccaataatatggtagatttttactttggcagggtcagctttttctgctaatgtaaggattgcatcatcgacataaggagaatgtaagataacattaccgaacgtaaacggaaatagtagtgcggcttttaatgaaacagatgcaccaagggagtcacccataagaaatctactcgttggcatttggaaagaagggaagcgttcttcaagataaggaacaagttcgaatgctaagaaccggatgtatgcttcattttgttcaccatctggatgatacttttctcggcgatccatgacagttttgtaaggaataccaatgaaaatggctttttgaatctgctcgtttactgctaattcttccgagtgacgcgcaagtttaccaaactgaaaataatcttttccatcttgtacaataaataaaggatatttgtaaagtggcgaaaaatcaggtggtaagcaaataattaaatcgagttcctctcctagcaatttactgtaaaatttctcatctaacattttatgagctgtcattttcattctctcctttcttgaaatccttccttctaagatgattgttttttgaaaagttactctattttagcatgaattacgttaaaagaaagaacattttgcctatttattagaaaaaattttctttttcataggacttcactgcaataataccgtttattgtgctatactgaaacatacaataattctgatttatcgatagaaagtggggattttgaatgagtaaagatattgactggagtaatttagggtttagttatattaaaacggacaagcgttatatttcacattggaaagacggagcgtgggatgaaggtactttgacggaagataatacacttcatattagtgaaggttctactgcacttcattatggccaacaatgttttgaaggtttgaaagcatatcgttgtaaggatggttccattaacctttttcgtccagatcgtaatgctgctcgtattcaaaaaagttgtgaacgtttattaatgcctcatattccaacagaaaaatttattgatgcttgtatgcaagttgttcgtgcaaatgaagaatttgttccaccttatggtactggagcaactctttatttacgaccgtttgtaattggcgtaggtgataatattggcgttcatgcagctccagagtatattttctctgttttctgttcaccagttggtccttatttcaaaggcggaatggcaccaactaactttatcgtttctgactttgaccgtgccgctccaaatggaacaggtgcagcaaaagtaggcggtaactatgcagcaagtttacttccagggcaaaacgcaaaagatcgtaattttggggattgtatctacttggacccagctactcatacaaaaattgaagaagttggctcggctaatttctttggtattacaaaagacgataaatttattacgccgtattctccttctattttgccaagtatcacgaagtattcattactttatttggcagaacaccgtttaggtttaaaagcagaagaaggcgatgtatttattgataagttagatgaatttaaggaagcaggcgcatgtggaaccgccgcagttatcacaccaattggcggtattcaaacaaaagatgacttccatgtattttacagtgaaacagaagtagggccagtaacaaaacgcctatttgatgaactatgtggaattcaatttggagatgtagaagctccagaaggttggatttataaagtgaaataatgacaaaccgtccgtttatcgggcggtttttttatgcttaaatataggtgttttattttaaaaaaagaatataagttttttgttgacagtatatcaactaagtgttactatatagtggtaataagtgatacagaatacccgtgatactaagtagtgaaataaaataggaaattggaaggaagggtgagttcaaatgaacgaatggatgattgaagctagtgggttaagaaagtctttcaaaaaaaccgaagtcttaaagggcgttgattttggagtaaggcgcggtgagatttttgctttacttggctctaacggtgctgggaaaacaacgactattcaaattttaactacacttttgaaagcagataatggaaaagcgagtgttgctgggttagatgttacgaaagaaccagagaaagtgagagagcatattagtcttacaggacaatttgctgcagtagatggtttactaactggtcgtgagaatattttactcattgcaaaattacgaggagaaaaaaatcctgatcaaacagccaaagatttactagcccgttttggtttagaaaaagcttcagaccgaagagcagacacatattcaggcgggatgatgagacgtcttgatattgcaatgagtttagtgggatctccggatgtgatttttcttgatgaaccgacgacaggtcttgatccagaaggacggattgaggtatggaaaacgattaaagctctttctgatggaggaactactattttactgacgacacagtatttagatgaagcggagcaactcgctgatagaattgcaatccttcacggcggaacgattattgcaaatggtactttagaggaacttaaaaaattgttcccacctgctgaaattgaatatgtcgagaaacaaccgtcactggaagaaattttcttagcaattattaatggtaaggagggagtaaaatgaaagcaattcgcgatacaagaatcttgtttggtcgctcgatgcgtcacattttgcgtagtccagatacaattattacagtagcaattatacccattatgattatgttgatgttcgtctatgtactaggtggagcgattcaaacaggaacagataattatgttgattacttgttaccagggattattttaatggcaattgcaagtgggatagcttatacggcagtacgattatttacagatgtgcaaaaagggctgttccaacgatttcattctatgccaattagtcgttcttctgtattatggggacatgttttaacttctttagtttctaatgcaatttcagttgttttgattattctagttgctttattaattggatttaggtcatctgctgggattttagaatggcttgctgtagctgggatattgctacttttcacgctagctttaacttgggtggctgttattcctggtttgactgcaaaatcggttgacggggcgagcgctttttcttacccactgattttcttgccttttataagttctgctttcgttccaactgatacgatgccaactgcggttcgggtatttgcggaaaatcaaccagtaacttctattgtaaatacaattcgagcattgttatattcagggtccgttggtaatgaaatctggattgcacttgcctggtgtgttggtattacagtcgtagcttatatctttgcagtactaaaatataaaaaaacaatctaacaaaaaaggattggctcaaaggagccaatcctttttttaattttcaccagaaatatgttttttcggtaaaatgaaatggataaaataactaacgatacaacaagcaaacattacccagaataccatgtggagtccgctatataaaatatctctaagcggttcgactagatctggattaacattacctgaagtttgtgggctgattagctgatttaaattactacgatttacttcgctaccagctgctgcacggaattgtgtggttaatacggagttgaaaatagttccaaagacagcgacaccaatcgtttgaccaacagttctaaatagtgtgttggaagcagtagcaataccagtttggaatctcggtacagcatcttggacggttacagttgtagtagtaaaaataatcccaaagccaaatcccataaaggcactatttaaatagaagaagatgtcatttgtagaagctgggaataaagctaaaataagtccacttgcagctgttattaatacgccgattccgactgtatggcgatttcctagtgtcattaaaagctttccgcctataaatgaaccgataatccacgtgacggaaagtggtgcaagcataaatccagcaattgtggctccgtgaccaagcattccttgagcccacattggaatataaacattaataccaattaaaaaggcactaattagaaaaccaattaagtttccaattaaaacaactggatttttaaataaaacaaatggcataatcggatctttggcacgtttttcgacaaaataaaaagcaacaaataataatatcgaaacggcaaaaagaatgactacgagcggttctgtccagttgagggactctccagctcgctgtaatgcaaataataatcctaaaagtgctacggtaaatagtgaggcaccaagataatcaattggtaattttactcgttcgacctcttcacgtaaataaagcaaaataagtaagatagttagaagtccgattggcacattaataaagaaaatccaatgccaagaaagttggtctactaaaaatccaccaacgagcggcccgaaaacacctgcaataccccaagcagaacccatgaaaccaagtacttttgctcgtttttcaaatgggtagacgtctgcgataatcgtcatagtagatggtaaaatcccgcctgctccaataccttgaatcgcgcgaaaaataattaattgctccatattttgtgcaaatccacaaagtgatgaaccaatgataaaaataattgtcgcaattacaaagatattttttcgtccatacaaatcagacagttttccgtaaataggaaccgtcactgctgatgttagtaaataaacagaaaaaatccagttcattaactctatgccgtccaactgacttacaatcgttggcatcgcagtactcacgatggtaccttcaatagctgccataaatgttgcgacaaatacggcgatggtaacggcttttacttttgtttgttccaaaaaattccctcccttttcgtctaccgaattatagcatataaaaggactgatttggaaaaaaattaatcttaagaaatgcgttaggtgaagataagcgctataatataatagaataaagcgaactaaaggaggaatatttttgagttacgaaccaaatacaacacaaacgatgcaaaaaattaaagagttaacttctatccctagtccgacagggaacacagggcaaatcattgaaaaactagtgagggatttagaagcttctaacatcccatataaattgaacaataaaggcggattaattgtaactctaccaggaaaagatgactccaaacatcgtatgctaacggcacatgttgatacgttaggcgcgatggtaaaagaaatcaaagcagatggaagattactattaactttaattggtggctatcgttttaatgcgattgaaggcgaatattgtacgattgaaactagcgaaggcgatttatatagcggaacaattcttatgcatcaaacctccgttcacgtatataaagacgctggtacggctgaacgcaatgataaaaatatggaagttcgtttagacgtaaaagcgctagatgctgacaaagttcgcgctcttggaatagaagttggtgattttgtttcctttgatccacgcgtccaaattattaatgatgagtatattaaatctcgccatttggatgataaagcaagtgtcgcgattttattacaactcattaaccatattcatgaaaataaattagagctaccacatacaactcatttccttatctctaataatgaagaaattggttatggtggtaattcaaatatcccagctgaaacagtggaatatttagctgtagacatgggagcgcttggtgatggtcaaacttctgatgaatacactgtttctatttgtgctaaagatggcagtggcccttatcatttaggtttgcgtaaacatttagttgaactagctaaaaagaataatattgattataaagtagacatttatccgttttatgcatcagatgcgagtgcggcgattaactctggtaatgacatcgttcatggtttaattggcccgggaattgatgctagccatgcatacgaacgaacacaccgcgattcactctatcatacagaaaaattagtttatgcttatttattttcgaatatattgaaataggaggaattctacatgaatgtccatgatttttctgaaaaagcaatgaatggtaaagaaatagcattaagtgactataaaggcaaagttttactcattgtcaacactgcgagcaaatgtggtttaacacctcaactggaaggtcttgaaaaaatgtataaaaaacttggcggagataactttgaaatccttggtttcccgtgcaatcagtttttacgtcaagatcctggtagtgatgaagagattttagaattttgtcaaatgaattacggcgtgactttccaaatgttctctaaaattaaagtgaaaggcaaagatgctgctccactttataaatatttaactgaacaaactggaggcaaaaaagtggaatggaactttgccaaattcctcattgatgaaaatggcgaagttgttgaacgtttcccatcaaaaatgaaaccggaagattttgaggacaaagtagaagcgcttgttgcagcagtcaaataaatagtaaaactcggtagtgaataatccgctaccgagtttttttgcatcttagggaggttaatttgcaagttacagaaatcaacttgtagtttttagtgtagcgtttataataaaaagaaaaaagggaggcaaccagatgaatttccatgtaaagcaaaataataatttagcgattggcgaagtagacatatattgccacccaaataatctggaagaagtaactaaaatagtgatggggctagaagagcaaaccgagaaaatctctgtcaaaaaagacggagtgacatatttactcgcaaaaagaaagattttatattttgaggctgtagaaagtaaaatttttgtgtatacagaaaaagacgtatatgaaactacttggaagttatacgagttggaagaaaaatttaaagatagttcctttttcaggtgttcgaaatccatgattttaaatatcgaatggattgaaaaaattgcgcctggctttcacggaaaatttgaagctagcctttttaatagagaaaaagtgattatttctaggcaatatgccaaaatcttaaagcaaaaattaaacttgggagggaagggcaaatgagcacaaaattaattcaatttattcaatcagcgtgtattatttttacagctgcaattatcacgatgatttgttcctatatctcaacgggagaatctgaaacagtagctattcgcgacatttttactatgctaggttttagtgttattactacttttgttcagcaattacttttcaataattcgataaaaacgaaatttgctttttatattcgtttaattgtttttttcttttttattagtgcagcaattttaggtcttggttggttgtttgattggtatcattccttaactggctttatgattatttttggatttatttgcgtgacttttcttgtaatgcatctgtttttcagttttagagatgccaaatttagtaatgaaattaaccaaaaactagcagaaatgcgagaaagggagacaaaatgataaaattaacgaatgtagttaaaacgtttggaaaagtagaagcagttaaaggcattaatttagaagtcgaaaaaggttcgttgtttgcattcttgggtgagaacggggcggggaaatcgaccacgcttagcatgatttgcacagaaagcgagccaacatctggagaaatttttattgacgatgaaaaattgacctttaaaaataggaaaaatttcagacaaaagttgggcgttgtttttcaagaaaacgtgttggacgatttacttaccgtgcgtgagaatctgtataatcgtgccagtttatatggaaaaacaaaagcggaaattaccgaacgtttagagcttgtttcttctattatgggaattgaggatatcttaaatcgccgttttgaaaaactatcagggggacaaaaacgccgagctgaaattgctagggctattatgcatgatccagaaattttactactcgatgaaccgactactgggctggatccgaaaactcgagtgagcgtttggaagattattgattatttgcgagaagaattcggcatgacggtgtttttaacgacgcattatttagaagaagcgaaggatgcggatcagctggcagttattcataagggaaatattatcgctcaaggcactcccgctaatattagaagtcgtttttcagtagataaaatcttcttttatgatgcaaatgtggaagaacttcaggtaattattgaaaaagcaaatttaccttataaagtgtcaaaaggaacgatacgtgttgacgtaatagatgaaaatatcggaattttggctattttgaatcaagcagcgggactttatagttcttttgaagtaataaaaggaaatcttgatgatgcatttatctcgatgattaaggaggattcaaatgattagtcgtaatttaaaaatctattttcgtgatagaactgcggtatttatgtcgctactcacgattttaattattatcggactctatgccatttttttaggaaataatatggaagaaatgtttaagcaggcttctggaaaaacgattggaatacaggaattagtgaatacgtgggtaattgcggggattttgtctattacgccggtcactgtttctttagctgttttctcattaaaagtgcacgatgaagagcagagtattgccagaagttttgcaataactccagcttccagatggcgaattgtcgcaagctacatcgttagtggtttagttgcttcatttgttttgtcagttatcactctttttgttggtgaaatgtacatctggttgacaggaggagcatttttaccgcttgaaagttgggttagtttaatcggcattattttaattaatgttctatgttgtagtagcataatgttttttatcgcaagcttagtgaaaaaagcgagcgcctttagttcggtttcgactattgttggaactgttatcggttttattgctggaatttatttgccgattggttcgcttcctgctgcggttcaaacggcgatgaaatgttttcctttcacatacggggcgtctactattcgtgaaatcatgacaaaagagccattgcaacaagttttcgcaggtaatactcaggcgatggatgcgacaaaagaaatgattggtattactatttattggggtgataaaacagtaacgacaggagtaagtttgctgattttaagcgtctttgcagtgctttttggcattttatctgtcgtcttaatgaaacgacaaacaaaataatttttgaataaaaaaacagccgaaattctcctagttatgctatactaatggaatgtgaatgaatctaggaggaaaataacaatgagtcaagatttgcaaaaagaagttgcttcacgcaaaacgtttgcgattatttctcacccggatgctgggaaaacgacgattactgagcaattactattattcggtggcgttatccgttcagctgggactgtaaagggaaagaaatctggcaagtttgcgacaagtgactggatggaaattgaaaaacaacgtggaatctcggtaacgagttctgtgatgcagtttgattataatggttcaagaattaatattttggatacaccgggtcactctgacttcagtgaagatacgtaccgaaccttaatggcggttgatagtgctgtcatggttattgatgctgcgaaaggtatcgaagcccaaacgctaaaactgtttaaagtttgtcggatgcgcggaattccaatttttacttttattaataaaatggaccgtcaaggaaaaatgccactagaactacttgctgaattagaagaagttttgggtattgaatcttatccaatgaactggccaattggtatggggaaagaattagctggtatttatgaccgctatcatcgcgttattgagcaatatcgctcagaagaagatgaacgtttcttaccacttggggaagatggagatttgaaggaagtacacgctattcaaaaatcactttattacgatcaagctttagaagaaatcatgctgttagacgaagcgggaaatgactttagtcgggaacgcattattgcaggcgagcaaacaccagtatttttcggaagtgccttaactaactttggggtagaaactttcttgcgtacatttgttgattttgcaccatctccttcaagccatgaatcgaatgaaggcgtgattgaagctgataatccgaagttctctggctttatttttaaaatccaagcgaacatgaaccctgctcaccgggaccggattgcttttattcgaatttgttcaggcgaatttgaacgcggcatgaacgttacattaacgcgaactgggaaaagtatgaagcttgcgaactcaacgcagtttatggcggatgaccgggaaactgttaatcgtgcggtagctggtgatattatcggtttgtacgacacgggtaattaccaaattggcgatacgataacgaatggcagtaaaaaactcgaatttgaaaaacttcctcagtttacaccagaattatttatgcgtgtttatgcgaaaaatgtaatgaagcaaaaacactttcataaaggcgtagagcaactcgttcaagaaggtgcgattcaattatttaaaacgtggcgcacggaagaatacattattggggctgttggtcagttgcaatttgaagtattcgaacacagaatgcgcggcgaatataattctgaaatccggatggagccaatcggtaaaaaaatcgctcgttgggtgaaagaagaagatgcggatgaaaaactatctaccgctagaagtatgctagtgaaagaccgttttgaccaaccgctattcttattcgaaaacgaattcgcgattaattggtttaatgataaaaatccagatattgagttaacttcattactataatagctacaacctatttgtactttcgcaaataggttgtttttttttgcttgacaattttttgaaacgcgctataattagttagaattctaattaataaggaggaatactcgtgagaagagagaagacgatggatacattaattcgttctattatgattaaatccaagcgaaaaatggacgcaaaagtagctcagtttgggctgacaacacaacaagcaagagttctgggatttttaaatgataatgctgcaaatgaaataatccaaaaagatcttcagcgaatcttccaaacacgtggcgcaagtatcactagcctcattcaaggactcgagaaaaaacaattaatttcacgcaaaccaagccttcgtgatggccgagaaaaagtcgttacgttaacaaaagaaggcaaagatattgtggatgaatttaatgcctcttttccacgagaagatgataaagcgaagaaaatcctttccgctgacgagtataaaacctttattgaactacttagtaaaattgacgatcagacagattaaaaaaatttaactatatagttagagttctaactaatttttagggggaattaaaatgaaacactcagataactattatttaacaaaagcgagcattcctaaagcgattgctcacttatctattccaatgatgcttgggatgtccgttggggtcatttataatattatcaatgcattctttatagggttgttgcatgatacgtcgatgttaacagctgtgacactcggtttaccaatgtttacgattttaatggctattgggaatatgtttggtgttggcggcgggacgtacatttctcgtttactcgggaaagaagacgggattaaggcaaagcaagtatcggcttttgttttatatggaagtttggttttaggtattatatgcgcgattatattaggctttttaattaatccagttactcattttctaggagcagacgcgacaagttttttacacacgaaaaattatacattggcgcttctcatttgtagtccgtttattattgctaactttgctttagaacaagtcgttcgggcggagggagcttctcgtatttctatgaatgggatgcttattggtacgcttgtaaatttagtgtttgatccactgcttattttgtattttaattttaacgttgtaggtgctgcagtttcaattggaattgcaagtacggtttcacttatttattatgcctggtatttggagaaaaaaagtgactatttatccattcggtttaaatggtttaaagcaacgaaagaaatcgttcaaaatgtttttaaaattggcgtttcagaactacttttatcattattcttgattgttactacacttgttttaaatcattattcgatgatttacggggaaggcgttgttgcaggttttggggtggcactacgagtagttcagttaccagaatttatttgtatggggctttatatgggaattattccactcttagcatataactttagtgcgggaaatattgcacggtttgaaaaagcgattaggtttacagctgttagtattggcttgattgtgcttgtgatttctagttttgtatttattttccgtttccaagtgatgcatctatttagtgacagtcaaagtgttatatcacttggggtgcatattatggttgcgatgctgatttcttctctattcagtggttttactggtctctttacgagtacttttcaagcgattgggaaagctattccggctacgattatgtctgtttcacaaggaattatttttatcccagtaattattttgggacaacattattttggcctaatgggcgtgatttggtctttaacaacaacagaaattcttacttgtttaatcggtgtgattctattcacaatccataatattaaaatagccagtagcgcaaaaactaaagacttggcggtttaaaaagtttgtgagaaaaattagttgacgagaacttctaaattatggtattattctctaggtaatcatatatcgttctttgacaaatgtcagaggggagtagcgctgattagcttttaatcaggataaagtcgtcattacatgatagagatatcatcggttttatcacatttaactttaaatgttagcgagacctttgcctttatgggcaggtctcgcttttttgtttcttcaaaataggagatctttgacattttaatagaacaaaggaggaaaagaattagtggatacagcaatgattttagagtacggatgggtattacttgtcctaatcggtcttgaggggattttagcagcggataatgcagtagttatggctgttatggtaaaacatctcccagataaacaacagaaaaaagcgttattttatggattgatgggtgcctttgttttccgttttggcgcattattcttaatttcctttttggcaaacgtttggcaagttcaagcgcttggtgccgcatatttactatatatcgcgattagtcacatttggaaacatgcaaaaggaaaagacggagaaaaagagaagaaggaaaaagctggctctggtttttggatgacagttctaaaagtagagattgcagatattgcgtttgcgattgattccatgcttgcggcagtagcccttgccattacgcttccagaaacaggatggggacacattgggggaattgataccgggcaatttgcgattatgttcttaggtggacttgttggcctaattattatccgttttgcagcaactcaatttgttaaattactaaaaagctatccaagtctcgaaacagccgcatttttaattgttggttgggtaggcgtgaagctagttatttatacattagcacaccctagtcttggcgtaattccacacagcttccctgaatcaacactttggaaattgattttctggggcgtgatgattctgattattctatggggatggttcgtttcctaccgtagtaagaaaaaaacagaaacaactaaataattttaactgaccagaagtgcaaatgtgtacttctggttttacatacaaccagatgctgaaaacacaattttatgatagagtagtagaaggatggtgaatgaggaatggatgtttctatttggggagaatatgcgttagttttccttgttttagttgtacttgaaggaattctttccgcagataatgccgtagttatggcagtaattgttaaaggtttaccgcacgataaacaacgaaaagccttattttatgggttagttggtgcatttgttttccgttttgttgcactatttttaatttcatttttagtaaaaatttgggaaatacaagctatcggcgcggtttatttattgtacttagcaatcaagcatatgtggcgccttaaaaaaggtaagcaagaagaagtcaaagaagcatcagaagccaaatcaacttccttttggggtgtagttgcacgtgtggaattgacagatatagcttttgcactggattccatgttagctgcagcagcacttgttgttactttaccagatttagggaattttgatattgggggaatgaacggtggacaatttatcgtgatgttccttggtggtattgcaggacttgttgtaattcgttttgcagccacacaagttgttaaattattagagcgttaccctacacttgaaacagcagcgtttttaattgtcggttgggtaggtgtgaaaatggcggtcttaacgctagcacatccatctgttgcaattattccagaagattttccggattcagcggtttggaagctgacattctggtcggttatgataattataggtttgggtggttatatcattgcgagaaaaaaagagaagaaaaccaaaagagtttgaatatgatcaagaagtaaaattgcgcagaagattaaaactggtgttagcgcgtatgacacccgttcaagtaattatcgcgtattattttattgcggttacgatttctactatcgtcttaagtttgccgttcactttacaaaaaggggttaaggtgtcgtttattgatactttattcacagcggcgagttctgttagtgttaccgggcttgcgacagtagatgttagccagacgtatagtactgctggaatttgggtcttaatggcgattttccaaattggtggattgggcgttatgatgattagcacgttcttctatttgattttgaagagacggattggactgaaacagcgccaacttattatgacagatacgaatcaatttacgatgagtggaatggttcggatgttgcgcgaaattcttgtcttgatttttggaattgaattagtgggcgcgttgattttagggatttattttatccctctgtatcctaatttttgggaagcgatgttccaaggtttatataactcagtttcgcttgttaccaatgctggtgtggatattactggtaaatcgctaataccattcgcaaatgattattttgtccaatttatttcgatattactaattattgctggtgcgattgggtttccggttttactggaaacaagacgatttttatttgagaaaaatacgctaataccgtttcgtttttcgttgtttgtaaaggtgactacacttacttattttgtacttttgattgtcggcggcttactcatttggttgtttgaatacaatcacttctttagtggcaaaagttgggactttggtttctttaactcgatgttcttatcggcgacatccagaagtgctggactccaaacaatggacagcggggcgctttcagtttctacccttttacttgtgtcgttcttgatgtttatcggagcttcgccaagttctgttggtggtgggatacgaacgactacttttgcgattaccattttatttatttattcggttattcgcggtcggaagcatgtttatatttttgggcgagaattgcatcaagaagatgttcgcaagtcgcttgcagtcacgcttgttgcaggatttctcagtatttctgcgatagtcatactcatgcaaacagaaacggcctcgctcatttcagttatttttgaagtgttctcggcgtttggaacgtcaggtttatcagttggtttgacgcctgatttgtccaccccaggtaaattaattattatcgtcttgatgttcattggacgggttggcatcatgtattcaatgcttagtttaagaaataaaaatcaacccaaaaatgccattcgattaccaaaagaaaaaattattactggctaaaataaaaatcctttctgcaaaacgcggaaaggatttttttggcattaaaaacccctaaccaatttgattaggggataataattaatattttgattttggaattggtcttctgaaaattcccattaaaccagttagtgtaattaagatacctgatacaatccaagcagtaccaataacaaagaataaaacgataccgataactactaagataacaccccaaccacgaggagctgatttaattaagagagaagcaattaatgcaactactgaggcaattaatgtaatccaccctagatttgccaactcatttcctagttcacctggtaaataagtaaatgtctgtatataatctgtgactgaatctccataattaataatccaaaaaccaactacaatcccaatgatggagccaattaatccgataataacttctggctttcttgagcccataataaaacctcctttttctatctatacgtttaataactttcccgctttgttaatcggctaaacacgttatagagcattgaagcacgcagctcaatcactggctgaacaactgtttttaccaatcgactggataataacaccgtcaaaccaaaagtaattccaaataatagtaaaaacgtagacgggctatattgaaagtcagtttggccaccttcacgaaagaacttaataaagaagccatgtaacaaataaacatataacgtatttttaccccatttagtaaaaaataaccttttttgtgggataaaactgaaaaaagcagcgatagagcaaaaactaatcatgtagacgagcgcgcgaatgaaaagaccaagcgacttcacttcgacaaagttagcatatggttttgatcctaaaaaccatttatcgtttagattcggatgcatggtaataaaaatcagtaataatacaacgaaaattcccccaacgatagaagctatatgcgttttaagaaagtaaaaatgttccttttttaaaaagtagcctactaagaagaatgggaagaagacaagggttctagataaacttaaataaccaccaataatatcaaagtatccagcaaccagtcctaataaaagcgcaatactcacagacttccaaggtttgatttttgaaaaaacaagcaacattaaattccagaaaaataaactgagtaaaaaccaaagcgaccattctggatctaaaaatttaatagaaagattctccttatttaaaagaaaataataaaaaatactgtagattagttggaaaaaaacatatggtaaaattaattttttcatcgtcttttttaaatatcctggcttaccaaaacttttagcaaaaaaaccagagattagtataaaggcaggcatatggaaagtgtaaatataaatgtaaaggacacgaaccccagcatattctgtaataaatgtttgaagaaaatgcccgaatacgactaagaaaattaaaataaacttagcattatcgaagtaactttcccgtttgatttcggtttgctccataaaaaacattcctttctattctaagttggaaatatcttgttttattttaccctagaatctgtaacgaatatccaacagttcgataacaaaaggtatcaaatattaataggcgatgacatacgtttgcgcattattaaaagaagtgctatctttagagcaatatcatattcggagggaagtatggaagatgttgaaacaaacaagcgattcgccggtgggtacgttgtttatcataatagaggatgcgcatattacaaagatttcatacgatgagccgactaattgggaaattttagcgggagagaagggcgagatagcaatatatcagcagcttctagaacaattagcaggttattttgaaggagagcgggaagtatttgatttaccaattttcttgcaaggaactccttttcaacagcgtgtttggcaagcacttagtgaaattccatacggggtagttgttagttataaagatatagcaatagctgctgggagtccaaaagcagtgcaagcagtggggcaagctaatcgcgctaatcctattcctatacttattccatgtcataggtgtgtgaaaagtgatggggcgcttggtgggtataacggagcggacattgataagaagcaatatttacttgcattagaaaaaggcttgcgtttaagttaacgcaagccttttttattaaactgttacttgttcagttataacgatatttttatcgtcatttagtgtggcatttaatttcttcgcttctggttgatcaattaaactatcggcaatcgcatcttctaaatgttcttggattgtgcggcgaagtggtctagcaccaaatttaggatcatatccaagctcgattaaatgttctttaacttctttagaaacgtctatagttacgccttcttgtgcgagcattgaatttaagtcaacgagcattaagtcgataatttgtactaaatcatctttttcaagagatttaaattcaataacgctatctagacggtttaaaaattctggtttaaagtatgcgcctagttttgcaaggatatctgagcctttttcaagtttattgtcagttgctgtattaaagccaacagaagcttctgtatcagtcgtaccagcattacttgtcatgataatcactgtatctttaaagcttactgtgcgtccttgagaatcagttagacgtccatcctctagaatttgtaaaaacatatgttgcacatccgggtgtgctttttcaatttcgtctaaaaggatgatgctataaggattacgacgaactttttcagttaattgaccagcttcttcgtgaccaacatagcctgggggagaaccgattaatttagagacgctgtgtttttccatgaattcactcatatctaaacgaatcatcgcttcacttgtaccaaataattcacgagcaagtgtgcgaccaagttctgtttttccgacaccagtaggtccaacgaataagaacgaaccaattggacgatttttagcttttaaaccaacacggctacgacggattgctttggctacttttttcactgcatcatcttgaccgattacttttccggttaagttgctttctaggtttttcattttggattgttcgtcttcttgtaaacgtcctactggaataccagttttttcttcaataatcgcttgaatatcagaagattgaataactggccgttctgaaaaggagttactagttttattttcttcaagtcgagtaatttcgtcccgaactttggctgctttttcgtagtcttccatttggagagcttggtttttttcttcttctaaacgagcaacacgttcactaacggtgttttcatccaatttttcaatagatagattgtattttgaaccaacttcatccattaaatcaatcgctttatctggcaaatgacggtcttgaatgtagcgagagcttaattcaaccgctgcttttaaagcttccggagaataaacaacttcatggaaatcttcatatttggatttcaagccatttaaaatagtaagtgtttcttcgttagaaggttcattcaccgttactggttggaaacgacgctcaagtgcagcatctttttcgatagtacgatattcttttagcgttgttgcaccaatcatttgtaagtcaccgcgagctaaggctggttttaaaatatttcctgcgtccattgaaccttctgcggatccagcgccgacaattgtgtgcacttcatcaataaacaagatcgtgtttttgcgttcttgtaattctttaattaattgtttcattcgttcttcaaactgtccgcggattcctgttccagaaacgagagaagcaacatctagtaagataacttctttgttcattaacttacttggaacttcacctgcgacaattgcatttgcaagtccttcgacaaccgcagttttaccaacacctggttcaccgataaggacaggattgtttttattacgacgattcaagatttcgatgacacgtttaatttctttgtcacgaccaattactggatcgagttgatcgtttttcgccatatctgttaagtttgttccaaattcatctagtaagccgtttccagcgccaccagtttgtgtttgtacttgtgcgtttctttgactttgttgttcacggcttgcttggtttgcagcgccacttagttgacggaaaatatcatcgaacggggaaccgccagcacctggaaattcatttgccccaaagtttgcttgatttctaacttctgcgtaacaagaggcacaaagcggcatttctacacgcttgccgttaatattcatatatagttggattgttgcttgattttgattgcatttttcacagttcatagttaatttcctccttttaaaaatgagaaatgaaaggtcttgactttgactatctttgaccttatgaattaattatatactgacctattttgactttcaagtattttgcttcaaatttttcataaaaaaacattcctataaaaaaggaatgtttctaagttttttaataaattggcaatgccgcgagtaataaaaaggcaaaggtcaaatgcgacagataaaccatgagaaggctcgggcgataagagtacatcacattccatacaagagatgcaacaaaaataccgatgatagcggcaaaattaccactaggcaacatcatgaccatacatagtaaggcggcaaaaatattagagaaccaatgattaaaataatggttcaaacgttttaatacaaatccacgccagaaaatttcttcaccggggataatcgcgacaatcaaaagcaaccatattactaaagagtgggtggaatacttattaaatgcagcttctacagaatgttctagaccacctggcattactttaataataaaggcacctatgtaaaaaataatataaaggacaattccggaaaaaattccaggtaaaatgcctttaacgaacgaaaattccttttttaaatcgtcattaaatatcacaaaactaagtaaaaataacatcccagctccatataaataccaaaaaacacgtgggaactgatatgttaatataacaagtagggcacataaaataagtcccaatacgagtttataatcaatcttgatgctcttcaaatactttacacctcttcttaacaaatacttctcatactactttaaaacaaatgaaatcgtttggcaacaattaaacaaaagataagataaaagttgtgcaatttaataaatcctatataatgaaaaaataggagtggttcatagatgttagaaaaaaactacaaatttttactttgggtatatatattctggtttttaggtagtgtattgctagtttctttacacattattccgccgcgtttaacaacaatccagtcactgtttttagtatttactggagtttttgcagcagttttctttattatgcaatatggcaaatggcttggatctgctattactctacttatttttgttgtcagtacttgtattgaatggatgcaattaagttatacggatgaatatattggctctacgctaggcgggagtttgtatggtattcctattacgatgggattcatttgggtcggaatgattgccgggacacacattatcgcacgtgaaatcacacttaaaatcaatgttgattggattcgtggaggaatttattcttttatcgcagctacgatggtgatgatttttgaagtcttaattgaaccaatcacaatgcagtctaaacaactatatattacgcaaaatggttttacgatcttacagctatctgattttataaattggtggctcttaggcctgattttacatttaatgatttattttattttaagtttaacggatagttgggaacgacttaaatatccagatttaaaatcagaaattgttatcgtttattggattattatcgctttctttgtctttttatcgttttatcttgatttatggacctcgattgctattattattgtttcaaatattatttttacagcttgttatttcttcagccttgaaaaagaaacgaagactacaaagaaatccgagtaatcagctaatcgattactcggatttcttttctttttgcaaaaatttcttggtagcaatttgtgcgttttcaataatgaaagggagggagctactagacatggctccagctccgacaacaaataagttcttaaacttaggtgactttttcgcaggatgtaagaaaccttgttgatgccataaatgttgtaaaccgaatattgccccgtattttacatgatatttttcttcccaatcagttggagtaataatatattcttcttcaatataatcctctaaatcaggaatctctaatctcgcctttaccgtatctaatattaattgacggaatgcaggtgtttgttctttccaatcaatgccactagtagtatttggagcagaaaccataatccgaacgcttgaatgattcattggcgccattgtgttatccgtggctgaaggattagttatatgaatcgctaagtctttagaaaggatttttttatggatggtattattcgcaaattctcggtaattatctggaaaaataatggattgatgtgaaaagggaagcactgttttcaaaccaaggtacaacataaaagcagaagaggagtattctttttctttctcctttactttcgtgttacttgttaacgaataaataaaatccaaattagtaaagtaataatcagcttcaatcgattgtccgttagcaagagttgcactagtaatttcttttccattcgtttcaaaggaggttacttcagaattaaagtagaatttccctttattttccataacgacttgttgcatcgcttcgacaattttattttgcccaccgattggatgaaaagtgccgaaataatactcagaaaaaggaataatactatatgctgctggaatatcccatggtgacattcctaaataacgcatttgtaaggaaaaagcgatacgaagatatttgctattaaaatatctggccaaatcatccattaaagagcgcccaagtgtgagacttggaagtgcgcgtattgtagttggtcgaaagaaatcaaacaaggaactgtagttaaattgattaagcggcgaaatataaagcatttttttcgtattttctctcataaaacgatcaaatccatcttcttcaccaggaaagtaagttttaataactgtttttgtttcagaataatcgctataaagtggaaaagtaatatctttaaaataaagcgtgtgtattggattgatcggtaaaagggagacataatctaaaatattacggttacaatccataaaaagagaagttaacacatgcgtcattgttaaagcggaaggccctacatcaaatgaatatttacccattttatgcagcgcagttctaccaccaatacggtcatttttttcatagatgcttacttgatagccgagttgacttaaaagcataccagtagctaaaccacccggacctgctccaataatggcaattttctttttactttccacattaaaacgctccttttcccgtttttaaacatataaaaaacgcaaaaacataaagcattgttaaacgaaaatgctttacttttgcgcagttagaaataattttttattcttctgtctcttcttcgtcttcttctacagaatgaataatttgataatttttgtgatttaccactgttttttcttcaatacctaaatctttaaaattttccatataagttaagtcgacaataacagaattttcgttgagcttttcaacaattcctgttaagccatccttaaattcaataatgtctccaacatgtgcctttgccattgttatcactccttcaattttcggtgttgcgtttatcttgatgaaaaagaatgtatgcatttttgaaccttccttaaattctgcactaaaaacctattaaaatcaactataagcctttaaaaagtgcattttaaatcaaaaatgcaacaatttagtgacaaaattatagaaaacgctccctttcttccagttgtaaaagaacgaaagaagccgtaatagaaaaaaacattctaaaaaatttttaatcaaatagttgtaacaataggtaaaacatggtactctttttaattgagggatagtcttttttgctgaaaatttttcggcttaaaaggttacaacaaatttctttacaaaggagaatgtaaattatggaacaagcaagttttgtagtaatcgatgaaacaggaattcacgcacgcccagcaactctattggtgcaggctgcaagtaaatacagctctgacgttcaaattgaatacactggcaaaaaagtaaatcttaaatcaatcatgggtgttatgtcccttggtattggtaaaggcgctgacatcactatctatactgaaggtagcgacgaaaaagaagcaattgaaggactaactgaagttcttaagaaagaaggattggctgaataatggctaaagagttgaaaggtatcgcagcatctgatgggattgccattgcgaaagcttatctgctcgttgaacctgatctttcctatgaaaaaactgaagttacggatgttgaaagtgaagtaaaacgttttgaaagcgcgttagaagtttctagaacagaactttcaacgattcgtgaaaaagcagctaaagacttaggcgaagataaggcacaaatttttgacgcgcatcttctagttttaaacgatcctgaattaacaggaccaattgaagaaagcatcaaaaatgctaaaacgaatgcagaaacagctttacaagaaacgacagacatgtttattggtatgtttgaatctatggacaacgaatacatgcgtgaacgtgcagctgatattaaagatgtacgcaaacgtgttctttctcacttactaggtgtgactattccaaatccagctttaattgatgaggaagtagttgttgtcgcagctgatttaacgccttctgataccgcacaacttaaccgtaaatttgttaaaggttttgtgacggatattggtggtcgtacttcgcattctgctattatggcacgctctcttgaaattccagcagtagttggaacaaaagaagtaactgctagcgtagcgaaaaacgatattgttattattgatggtttggaaggtaatgttatcatccacccaacagaagaacaaatcgctcactatgaaaaaattaaatctgattttgctttacaacaagcagaatgggaaaaacttaaaaatgaaaaaacagtttctaaagacggcgttcacgttgagcttgcagcaaacatcggaactccgaatgatttagaaggtgtcatttctaatggcggggaagcagttggactttatcgtacagaattcttgtacatgggtcgcgacaatttcccaacagaagaagaacaattcgaagcgtataaagcagtagtttctggtatggacggaaaatctgtggtagttcgtacattagatattggtggcgataaaacgttaccttatttagaacttccagaagaaatgaacccattcctaggattccgtgcaattcgtctttgttttgcgaatgaagaattattccgtacacaacttcgcgcactacttcgcgcaagtgtatatggtaacttaaaaattatgttcccgatgattgcaacagtaaatgaattccgccaagcgcgcgatattttactagatgaaaaagcgaaactaaaagctgctggaacagaagtatctgattccatcgaacttggaattatgattgaaattcctgctgctgcagttttagctgatcaatttgcaaaagaagttgatttcttctcaatcggaacaaatgacttgattcagtatacaatggctgctgaccgtatgaatgaacgcgtttcttacctttaccaaccatacaatccatctattttacgcttagtaaaaatggtaattgatgcttctcataaagagggcaaatggactggtatgtgtggggaaatggctggagatcaaacggctgtaccacttcttttaggcttaggcttagatgaattttcaatgagtgcttcaagcattcttaaatctcgttcgttaatcaaacgtttagatcaatctgaaatggttaaattagcggaagaagctttaaataaatctacagcagaagaagttgtagaattagttgagaaatatactgcagagtaagctctgatgaagacctagacaaatttctttgtctaggtctttttatattgtgaaaaaagggtgtgcaaagtataattaaaaatacagttagcttaaaaaggaggcaacaagattggttatctattcattagcaggattttttcttctgcttttcattgttttatcttttatagatagacgaagaataagtaacgggattgttttaacacttgcactatttttctctttactttcccttatttacgttactctttcaaacgggaacgaattgtttgtttcaattatgagtacggtgttgattttactgttcttacttattccattttttataattggacttgcaacaacactaattatgaacgggcgtttaatgttaaaacgggaaggacgaaaactcgctaatatgctaccgttatttattggcttagttatcgtcattttatttattttttggttcggtagtattttgaaaaacggcagcccgatacttggaatggttgtagtatttgtaatggcctttgtaggatatttttcgtttttatttttatcatttcttctatcaacgttcctatatcaattcaatttcccaagatataatcaagattttcttattgtgcttggtagtggcttgattgatggggatagggtgccaccgttacttgcgagcagattaaatcgtgctatcgcgttctatgagaaacaatatgacaaaaaagggaaacgcgctactttcatcgtttcgggtggacagggcgcaaatgagacggtctcagaagcaagagcgatgcgtgactatttaattagtaaaggtattgatgaaaacttcattattatggaagacaaatcggttaatacacttcaaaatatgcaattttcaaaagcaaaaatggatgcaattatgccgacatataacagtttattttcgactaataactttcaccttttccgagcaggtttatacgcaagaaaagctggtctgaaaagtcaggggattggtgcaaaaacagcactttattatatgccaaatgccttgattcgtgaatttattgcgattaccgtaatgtataaaaaagttcatttgatactacttggcttagttgtattgttctttgtatttttagcgataattggtattacatttaggtaggaggttttttaggtggaaaaaataggttttgttggtactggcgtgatggggtcaagcatggctaaacatctgcttgaggctggctatgaggtgcatatttatacgcgtacgaaagaaaaagcagaagcacttcttagtcaaggggcgctatgggaatctgatccgggctcactaggagctaaagtggatatcttaatttcaatggttggctatccaaaagatgtggagcaactatacttaggtgaaaatggtttcttagataatttgaaagctggttctgttgcgattgatatgacgacctcttcacctgcattagctaaaaaaattgctgaagcgggccacgaaaaagggataggtgtacttgatgcgccagtttcaggtggtgatattggagcaaaaaatgggacgcttgcgattatggttggtggagccgaagatgtattcttaaaagtgaaaccgatttttgaaattcttggtagcagtgtgatattacaaggagatgctggctctggccaacatacaaaaatggtaaatcaaatcgcaattgcttctaacatgattggtgtgacagaagcgattatttatgcagaaagagcaggacttaatccttcacgcgttcttgattctatttcaggtggagcagcgggtagttggtcacttacaaacttgattccacgcgtactacaagatgatttttcaccaggattctttattaaacattttattaaagacatgggaattgctttatctgaagcaaaacaaatggggttagagcttcccggacttaccttggctgagcaaatgtatcagactttggcagaacaaggtttgagcgaggaaggtacacaggcgctcattaaatattatcggtaaataagaaacacccgctaaattagttagcgggtgttttttattttgctaaaaattgagccatccgatctaacgcttctgcaaggttattaacggaagtggcataagaaagtcggaagtaacggtcacctttttctgaaaaagcatttcctggtacgacagctactttggcttcttctgcgagtctaacagcccaatcaaaggagttttcagttatgtcatctgggagttttacaaagaaatagaaagctccatcaggtgggatgactgtaaagcccattttttctaagcgatcttgtgtgaagtttgctcgtgttttatattccgtgcgcatttggaacgcatcgtcttttccgtttgtaatggcttctaaggctgctttttgagaaattgagctggcgcatgtcaccgaatattgatgaattttcagcatttcggtagtgattttttctggggctagtaggaagccgattcgccaaccaatcattgcatgcgatttagataggccattgattacaattgtttgatcacggagcattggtgcaatacttacgtgctcttcatggtacgttaattcactataaatttcatctgcaataacgaaaatacctgtttcttttaaaacttctgctagatctcttagttcttgtttagaaagtgagacaccagttgggttagacggataaggaataataagtgctttcgtttttggtgtaatatgtgctcgtaattgttctggcgttaatttgaaattggattccgttgtatctactttgaccgggcgggctttatttagttttataagtggttcatacccaggataaattggatcaggtaagataacttcatcacctggctctaagatagtttgcagcgcgactgaaatagcctctgtagcacctactgtaacgatgatttctttattactataagttaggtcatatttctcctcaaagtacgaagaagccgcttcgagtagttctggcatacctgcattcggtgtgtaattggtgaaattctcttgaatggcggtgatggctgcttgttttacatgctctggcgttggaaaatcaggttccccaagtgttagacgaatcatatcaggaataccagtaactcttgtattaaatgttctgataccactaacttcaatgtcgcgcaattctggtcgaatggatttggtcatttttgtcacctttctttataagaaaatcccgtgaaaatcaggtgggagtaagcttcataatttcattccattatagcttaaaaagggagaaaagcaaaatatctgaaaatattactaaaaagccttgcacttttatttagaatgctataagatagttttaataatgataatcattttcagttagaaatgattggttgaatgtggaaggggccaccggatatgactaaaccaggtaaatacgaagctctcttttttccaacaaaagacggcttgctaaaaatacatgcttacggctttaatccctgtggttcatggggtgaagtatttgctacaattggcgaccaaacgatttgtgtcaaaggatttaatcgccataaaacaattgttcgagcaacaaaaatgattataagtgctacggcaaaccgaaaaaatgaattttaattatcaaagactgtaaaaaagataaatacttttttatagtctttttttgagataaaataagcatgaaaatagaacaaatcgtgtcattctggttaatttaaaataatttctttttctgaatatttccagaacccttgcgttatacgtgcggtttgcgataaaatttggtagtatagtgaaagaaataagatatggcgaaaaaaccagatatgaggaaatatgtaaaaaagcattgccacgcgcgtattacaattacagcaaggtagcaaattttttgcacgtcagatggtggatttgagaggagagtataagatgtctcagttactgggaattattcaacgtttacatgcaatgcaagaagatgagtcagctgaaacacaagcaagacgttttgaaaaaaatggtacgcctgtgtgcgaagtgaagtttttccaagcttctaactcatttgaagtagaaatctatggcgacaatagcaaatatcaatttgatgatattgatatgactgcaatcgaaatttttgaaacgttacaagaaaacgaataacaaggtaaacaatcagtcaatctggttatttacttagaagccgtgaatatttattcacggttttttttatgtaaaaattcactttcaagcactaaatgaaagaaatcagactaaatagtatggtagaataggagatggaaaagtttcgttttattttttttaaagttgaaaggaacttcgcagagcttgaaaatacaaggaagaggaagattctaaatgatctctaatagatttggacaatttattgacaatgaactagctgattcaatgatttccgctgaaaaagtagctcacgtgcaactgggtaataatctcgaacatgcgctacttgtattaacgaaatgcggttattctgttattccagtactagactttgaatttaaactccatggattaattagcgcagcaatgataacagatgccattctcggactcgaacggattgaatttgaacgactagaagatttaaaagtggaagatgttatgcaaacggatttcccggtgattaaagattttaataataacgagcgaattgtacgcttacttgttgatcatccttttgtttgtgttgtagatgaagaccaccattttgaaggaattgtgacaagacgcgttgttttaaaacaagtcaatcgttatattcatttacaggtggaggaaaatagatgattgtaacggaatatgaacttcttgtttgtttggcagaagaactaaatatgcgtaaaagtgcggagaaattatttttaagtcagcctgcgttgtcccagcgtctgcaaacgattgaaagcagatggaatacaaaaattttcattcgaacgcaaaaaggtttgcttctaacacctgaaggagaagccattgtccgtcatgcatccagtgtgattgagcgcgagcataccattcaagaaaaactagaagcaatggaaggcgtcgttcgcgggacactgcgcattgcttgtgcgagcgttgtggctcaaatgtggttgccacgtgtattaaaggcatttgcaagtgcttatcctaatgtccagatttcccttgttactggttggagcagtgaagtaactcagcaattagcggctggtaatgtccatataggtattgtacgcggaaactcgacatggaaaagtgttcaaaaacccttatttaacgataaactcgttttagttgatacagaaatcactaaaattgaagaagttttccagacaaatcgtccgtttatccaattccgtagtgattcgaattactatcaagtgattcaagattactggcaaagaaatttcgggaaaatgccgcgccaagctatgttgatggatcaaatggaaacctctagacaaatggctttaaacggtattggttttgccattttgccagaagtgacgatgttaggctatacggacaaaatcaataaaataccactaagagaaaaagatggctcgattttaagccgagaaaccaacttattgacctatgaacagtctcttggtctaccacaagtgaaggcgtttttagaaataacagataaattccttgaacaagttaaatagctatggcaaaatagaaagcagaacatatcggaaggagacaaaaattcatggaacaaatggatgcgcaccaaattatttcttttattcaaaatagcaagaaagcaacaccagtaaaggtttacctaaaaggggacctagaaaaaatcgattttcctagtgatgtaaaaacatttatcactggaaatgcgggaactatttttggagaatgggcagttgttgagccactattagaagcaaataaagcgaatattgaagattacgttatcgaaaatgatcgtcgtaactctgctattcctttgttagatatgaaaaatattaacgctcgtattgagcctggcgcagttattcgcgaccaagttacaattggcgataatgctgtaattatgatgggagcaagcattaatatcggttctgttatcggtgatggtactatgattgatatgaatgttgttcttggaggccgcgcaactgttggtaaaaactgccacattggtgctggttctgtccttgcaggcgttgtagaaccaccatccgctcaaccagttattgttgaagacaatgttgtagtgggcgcaaatgttgttgttttagaaggcgtacgtattggagaaggcgcagttgtagcagcgggcgcgattgttactaaagacgtagctcctggaacagttgtagcgggaattcctgcacgtgaacttaaaaaattagatgcgaaaacagcttctaaaacagaaattatgcaagaacttcgccaactttaaaaatcaaagggaactgttccgtctgttggcggagcagtccttttttagaaggagagagcaccatgttaaatgaatttattgccattcgacgtgatttgcaccaaattcctgaaacaggatataaagagctaaaaacccaagcttatttactcgattatattagcaaattaccaaacgagtttttagaaataaagaaatggcgcacaggaattttagttttagtaaaaggtactaatcctggaaaaacaatcggttatcgtacggatattgatgcgctgcctattacggaagagactgggttgccatttgaatcgaaacatgctgggaatatgcatgcttgtggacatgatttacatatgagtatagcgcttggagtattaacgcattttgcaagtaaaccggcaaaagataacttattatttgtgttccaaccagctgaagaagggccaggcggagcaaaaccgattatggaaagtgctgaattttccgagtggcgccccgatacgatttatggtcttcatattgcaccagaatataaagtcggccaaatcgcaattaaaccaggcttactattcgcaaacacttccgaactctttatttcatttaaaggaaaaggcggacatgcggcttatccacatttggcaaatgacatggttgtggcggcaagcgcttttgtcggacaaatgcaaactattattagtcggaacattgacccgatggatagcgcggttataacaatcggacgcattcacggcggagaaatccaaaatgttattgcagaaactgcctttttggatggaacgattaggacgctttctccagaaacaatggaaatcgtttggactcgtttaaaacaattagcaaaaggatgggaagaagcctaccaatgtgaagtagaattccatcctggatccgattactatcaagtggacaatgatccagttgaaacagaagaattcatccactttttggaagaacaatatccagaaagctatgtgccagctcgttcagcgatgactggagaagattttggttactttttatctgaaattaaagggtttatgttttggttaggcgtggattccgagtacagtttgcatcacgcgaaacttagtccaaaagaagaagctattccatttgcaatagatgtattagtgaactttttggaaagcaaataaaaaagacatcaattcgttctcaaaaggagcgaattggcgtctttttaattattatttggtccgaatgtgctaacaaaattaagtggtaattcaatttcgttttctgcgagtgcttcgcgaatatctttgagtaagtcacgttgaacagaatactgctcgccgttcactgctttaccaactacgcggataatcatatttgttgcgtcaatgttttgcacgcctaagacaacagggggctcaacgatatttttattttcttttgcagcaacgtcacaaacctcaccaataattttaattgctttttccggatcttcatgtggactaatttgaatgtccaccatcacacgcatattaccgcgcgaatgattactaacgaccataatttgtctgttaggaatgaaatgaagcgtgccatcaaaatcacgtacctgtgttgttctaaggccaagtgcttctactgttccattaactagtccaatggtaatcgtatcaccaacatcaagttgacgttcaagtagaataaaaaatccagtcacaacgtcactaacaagcccttgagcaccaaaggcaatggccaaactcgccaccccagcacttgcaataatcgctgtaacatccataaagttctgtaataataaaatcgcaaaagtgaagaataaaacatagccgtaaaaattagaaattaagctttctaacgtatccgcgcgcccaacagaaactgcttgttgttgccgatatttgcggaagaaactacggataattttattaccaaccacgcggaaaataaaataaagagcaattaaaatggcaatttttattccaactgaaataatatgattccaaaattggtcccagtcaatagaactgaaccactttttgagtaaattcatcttctggtccacatcctttgaaagttctccatccatttcatctcccccttcctaatgaaatgtccttttctattctaacaaaaatttcacaaaaatgctgttataagaaataatttttcactgaaaaagattcgttttcaacaaaaaaagttaattttattaaaaaaaatttaaaaaagcgctagccattcttgtagtaagatggaggcgctttctaaaatgtgtgaaatagcgcaaatcaaactgtatgatgtgaaactaatgtgaaacttgtgtacaatgataaatgttattgctttttttaaaagtgatatgggccgaatttttgcctagtaaataattcaatttaaaaaagaaaggggattttattttgagcaagattaaagtggaagaactaacgaagatttttggaaaaaaggcttctaaagcatcttctttactttctcaagggaaatcgaaaacagagattttgaaagaaacaggggcgactattggtgttaataaagcatcttttagcgtagaagaaggagaaattttcgttataatggggctttctggtagtgggaagtcaactttggtacgacttttaaaccgtctaattgagcctacgagcggaaaaatttggctggacggaaaagaactctctagtttaaataaaaaagaacttttggaagttagaagaaaaagcatgagtatggtcttccaaaattttggtttatttccaaatagaacgattaaccgtaatgttgaatacgggcttgaaattcaaggaatgaacaaagaagaacgtgagaaaaatgcagcagaatcgcttgcacttgttggtttagctggttacggcgaacaatatccttcccaactttctggtgggatgcagcaacgtgtagggctagcgagagcacttgctaacaatccagatattttattaatggatgaggctttctcagcacttgacccacttaacagaaaagacatgcaagatcaactactagatttacaagataaaatgaagaaaacaatcatctttattacccatgatttggatgaggcgcttcgtattggcgaccacattatgattatgcgtgatggttctgttgttcaaactggttccccggaagaaattctggcacatccagcaaatgaatacgtagaaaaattcattgaagatgtagaccgttccaaagtttatacagcgagcaacgtaatgatacgcccagaaatcgttaattttgaaaaagacggccctcgtgtcgctttaaaacggatgcgtgaagctggaacatctagtgtatttgttgttaagcgtaaccgtgagttagttggtattgtccatgcagcggaagtttctaaactagttaaagaaaatattacttcgcttgaaactgctttacacagtgatgtaccgacaactggtccggatacgccacttgcagaaatcatggatactatctcgacaacaacgattccaatcgctgtaaccgaagatggaaaattaaaaggaattattattcgcggatctgttctggccgcactttctggaaacgaggtgaacgttaatgcctaatattccaacgattccattagctagttggattgataaattagttgatggcttaacgcaatttgaaggattttttaatgtaattacaaatatcattggcggaattgttgatgcattccaatgggtattcgacttagttccaccatggttatttattattttactagtatttgggactttctgggttaaccgcaaaggaaaaaaatggggattaattatttttgaagttgtcggtttactattaatttggaacttagatttctggcgtgatatgactcaaacgctgactcttgttcttacgagtagtttaattgcacttgttataggtgttccacttggtatttggatggcgaaaagcggtatcgttgaaagcatctttaaaccggtgcttgactttatgcaaacaatgcctgcctttgtatatttaattccagccgtagcatttttcggaattgggatggttccaggggtagttgcttctgttattttcgcaatgcctccaactgttcgtatgactaacctaggtattcgccaagtttcgactgagcttgttgaagcagcagattcatttggttcaacaccttggcaaaaactttggaaagtacagctaccaatggcgaaatcgaccatgatggctgggattaaccaaagtatcatgttagcactttccatggttgtaattgcttcgatgattggtgcaatgggacttggaacacgtgtttactttgcagtaggacgtaatgacgctggtggcggatttgtagctgggattgcgattgttatcgtagcaattatcctagaccgtctaacacaagctttcaataaaaaagcgaaatcagaataaggaggagagtagattgctaaaaaaattaatcaccaccgcagttttggctatgcttattttcactttagcagcctgcgggacaacccttgctccttatgacgcgaaaaaagatttaggcgaacaaatcaattatacaatcacaggaattgatgctggagcaggaattatgcttgcaacacaaaatgcgattaaagattatcatttagatgatgacaattggcagttacaaacaagttcgactgcggctatgactagtacactacaaaaagcgatgaaagataagcgcccgattgttgtgactggttggacacctcactggatgtttacaaaattcgacttgaaatttttagatgatcctaaaaatgtttttggaaacgctgaaaatatccacacaattgtccgcaaaggtttgaaagaagaaaaaccttctgcctacaaagtgctagataatttcttctggactgctgaagatatgtctgaagtaatgctagaagttaatgacggagtagatccagaagaagctgctaaaaagtggattaaaaacaatccagaaaaagtagcaaaatggaccgatggcgtggaaaaagtagatggcgatgaaatcaagcttacttatgtagcttgggattcagaaattgcctccacgaatgttgttgcagaagctttgaaacaagttggctataaaccaaccattcaagcaatggaaattcaaccaatgtgggcgtctgtcgccacagatgcagcagatggaatggtcgctgcatggctaccaaacacttccggaatctactacaaagattacaaaggaaagtttgaagatttaggaccgaacttaaaaggtgcgaaaatcggcttagcagttccaaaatacatgacaaacattaactccattgaagatttaaaaataagtaaataaactttggaaaaggcatgaagaagttcaagctatacttgatactttctccgtgccttttcttcactaaaaaggtaaaataatagttaattgatgaatttgctaggaggaagatggatgtttaaaaaattcttgaaaaaaagtaaaaatgaaaccgtatttgctcatgtgactggacaactgattgcgttagaagatgttccagatccagtttttaatcaaaagatgatgggcgaaggtattgcaattaaaccagaaagcggcacaatcgtagcgccagttgatgggaaaattattcaacttgcagaaacgaaacatgcttttggtattcgcacggatatggggcaggaaattctcgtgcatatcggtttagaaacggtatcattaaacggagaaggttttaacgtgttagtaaacgttggcgataaagtaaaagtaggcgatccaatcgttgaagcggactttgattttatcaagaaaaatgccgcaagcacagtggtaccaatggttgtaactaatagttcagaaggcaaatacgattttgaattcgctggaactccaaatacggttgctgggaaaacagaagtatttactacaaatttaatataataagcacaaaatccatgagaagccaattttcttttcatggattttttagtattcatttgcgtgttaaaagggtagaatgaaggtaattagtattaaaaaggagcgaaaataaatgttagaagtgatagttcaaaacccaagagatgcgtacttagcagaaaaatatggcgcaaatagaatggaagtagtttccgctataagtgaaggtggcctaacgcctagctacggtgctattaaagaaatcgttcgtgcttcaaaacttccggcgatgatgatgattcgccctcatagtttttcgtttgtatacgatgagcctgctagaattgtgatggaacgagatattgaacttgcaaaagaagttggggtcaaaggtatcgtttatggtggaataacggaagacggaaacatcgatcaagagcttctagaaaaagtgattgagtggaaaggtgacttagaccttactttccatcgtgcgctagaagcaacaaaagatattgaagcaagctaccaagttttacgtacatacggccaagacattaatcaattattaacttcaggtggaacagctagtgcacttgattctttgccacgccttaaacggtggataaatgacagtaaagaaaatccaagttcatttaaaattctagttggaagtggcgttaaacctgaaaatattgctatctttcaagaaacactaaatcatacagattatcacgtcggaagtgcagctagagaaacgaatgatttcgcaaaagacattttaaaagaaaagatcaatattttaaagcagcatattaaccaagattgattctacgtagcaggtagccttacgagtctagatacgctataatgaaacaagactattcttaaaataaaggtggaaaaaaatgaataactatattggcaaaagccaagtaatgacagtaaaggaaattaaagaaacaggttggctcctagagaaagatgaagtgactgtttttttatctaaatcgaatacacatgaaacagaacttgctgttggagatgaagtaacagcatttatttttgttgactacgaccgagaaatccgcgcaacaacaattattccaaaaattcaagttggacattacggctggggcacagtaaccgaagtacgcaaacatttaggtgtatttgtggatattggtattgaaaaagatgtcgttgtatcattagatgatttgcctgcactaccacatttatggccgaaaaaagaagaccgagtgatgattgcacttcgagtagacgaagaaaatcgcgtgtggggagttctcgctgaagaagaacaattccgcgctattgcggttcgtgcagatcaagacctttttaatcaaaatgtagaaggaaccatttatcgattacttaaagttggctcctttgtctttacagatgatttccatattggctttattcatgaaagtgaacggactgcagaaccgagaatgggagaacgtgtaaaagcccgtgttattgcagtgaaaccagatggctcacttaatttatcattacgtggtagagcccatgaagtattaaatgacgatgcggaaatgatattaacttacttacgaagtgttggcggggaaatgccatttggagataaatcagatccagatgcaatccgtgctaaattcggaattagtaaggcacaatttaaacgcgcaattggtacacttttaaaagcaagacggattacacaagaaaatggagtaattactaagttaacagaagaggcatccgactaaagtagtagagattgttccaactagcgcggtttgtttccactagcaaatcatcgctataataaacacagctgtacaaagtagcgaaaaatcgagaaataactttgtctaaagaatggcttaaggaggtgtgtcagcttgaaaaaaatggaaagctcggttgtttttatatttttaattgcgattattgttggcgttggtcttgagatgttattccagtgggaattactcattttatttgcactcggaatattcttcatttttacatcaaggaaagcaagtgccacgaaaaagagcgcaaaaaactcactatttattggtatcgtatttatcattattgcagtgctgttaacaactacttttaaagttggacttgttgttgcaggtatttatgcgattattcattatataagccggaagcgggcaccccaattattaatgcttaaaacgagagagccagacagtaaaattgatcgcacgggtaaatttattcgtaatcagtggtttggtaatcagcggatattagatgtcgtgtacgaatgggatgacatcaatattcaaacaggaataggcgatacgattcttgatttaggaaatacggtgcttccgactggcgaaagtattattatgattcgcagtgtatccgggaaaattcgtatcctcgttccatttgatattggcatttgtattgaacactccgcgattttcggaaatatccaatatgataaagaaagcacctctatccaaaataatagcatcaaggtctactcagataattacgaaagttccgcacgaaaagtgaaaatcatgacttctgtaatcttcggagatttagaggtgatcaggttatgagtttttcgaaactaatgatggtagtttgctcaggattactccttgttgcaacagccattggaacggtaggatactattttttcagtgaaggttcttggtataaaatcttaattgaacaaaaaatattttacattccttttatcgtctttgttccgctgacagctatttcgataggtttaattattggcggcttacttggctattttgttaagcaaaagtttgagtcgattgacttttcgattcggctgctaggacaaggcgatttagaaaaaaagattactagtgaagaagatgaaacttttttagaagtacagcaagtctataagcaaatcgaccgtttgcgtgataagatgaaagcacaaacgattctgactcaaaagctagcaagtgatcgcgctgaatcaagtggtcaaacgaaagaagctattttgtcagaagagcgtcaccggattgcgcgtgagttacatgattctgtgagtcaacaattattcgcagcgatgatgctattatctgccttaaatgagcaaagcgaaaaaagtgcaactcccgccatgcaaaagcaactaaaaatggtagaatctattgtcaatgaatcccaatctgagatgcgtgcactattacttcatttgcgaccaacgcagctcgaaggaaagtcattaaaaacgggtatagaacaattattaaaagaattaacaaccaaattacccatcgaagtcgaatggcaaattgaagatattaatttgcaaaaaggtattgaagatcatttattccggatagtgcaagaattactatcgaatactttgcgtcactctaaagcaaaattattagaagtacggttagtgacgatggataatttagccgtaatgaaagtagttgatgacggcgtaggattcgatatggataatgttcgtcaaggttcttacggtttacaaaatatgcgtgaacgagtcgctgaatttggtggtaccattaaaataattagctttaaaggacgaggaactagcgtagaaataaaaatcccacttgttgcgaaaaaggacgtggaaaacgaatgataaaagttttactagtagatgatcatgaaatggtacgtataggcgtgtcagcttatctttctgttcaagatgacatggaagtagtcggcgaggcagaaaacggccgagaaggcgctgatatggctttagagttgcgtccagatattatcttaatggatttagttatggatgagatggatggcattgaagcaacgaaagaaattatgaagaattggaaagaagcaaaaattattatcgtcaccagttttattgacgatgaaaaagtatatccggcactcgaagctggagcgagcagttatatgttaaaaacctcgacagcgagtgaaattgccgatgcgattcgagctacatacggcggtgactctgtccttgaaccagaagtaactggtaaaatgatgcaaagactaaccgctaaaccagaaaaaaacctacatgatgatttaacgaatcgcgaaaatgaaatcttacttcttattgcagaaggtaaatcgaatcaagaaatcgcggatgaactattcattactttaaaaacagtaaaaacacatgtaagtaatattttatccaaattagatgtacaagaccgcacacaagctgcaatctatgcatttaaacatgatttagtagaaaaaaagtaacagggaggtaagctacacatgaaagagggatttgcagtcatcggtcttgggcgctttggcggaagtatttgtcgttcacttgtcgaacaaggaatggaagtgcttgccatcgattctgatgaagaacgggtaaatgaatatatgtcgattgctactcatgcagttatcgccaattcaaccgatgaaaacgcgcttcgtcaattaggtattcgaaatttcgagcatgttattgtcgcaattggtgaagatattcagtcgagtattttaacgacgctgattttaaaagaaatgggcgtaaaatatgttactgcaaaagcaacaaatgataagcatgctaaattactagataaaatcggagctgaccgagttgtccatccagagcgggatatgggacgacgaattgcgcattatatcgtatcgaaaaacatgcttgattatctagaactttctgatgaatatagcttagtggagatttcggtttctgatccgcgtttcctcggcaaaagccttgttgacttagattttcgtaactcatttggcgttaacatcgtcggcataaaaaaagacaaacaaatgattattactcctgaagcaaatgatgtacttcatgaaggagatattttaatcgttattggttcagatgacgacattgagcgattacaagaaaaaattcaataaacataaaacctatgcaatatatgaagatgtgcaacaatatctattatatgcctaggtttttttattgtttacttgctatctaatcatttattttctattatagttacagagcttaagtaaacgtgatagaagagaggggaactgatgaaaaaatttttgctagataaaattggggcgcgaggattaattcaaatgttgcaagcatttatttatgcaagtatttgtgttattgttcatactgttatttttcctgatttggctggagttttacctattgttgttttaatagggattatttccatgcaacctacatatgggattactcgaaaagtcattcctcaaattgcgatagcttttacgttagcgtgcgcattcgttattatcagtacttacttttttccaatcaatgtatatatttattattttgtaatgttaattgttattttaatagtgaattttacgatgccgcaaaaatacatggtgatgacgctagcaattggaacagcactttattttcttgggacagaagacttaccaatgccgctttacgtaatggtgatagtagcactcgttgatgtatttgtattttttattttagtaagactcgttgtaaggtacgtccatttgccgcttgaaaaaactgtccagacgatcatgaagcaattaatgggactatttgataaagaaatggaaagcgtttttaaaaataacgggaaatttgtatcgaaaccactgtatagtatttttgtacaatcgcaaatgtttattaaagaatatggcactagtaaaaatatgaatccgcgtcatgtggaaatttatcaagcgttactgccgaattatttacagctcttttttcatatgcaaacgcttgaggatattggtagggtaggtttgtcggaagaagcaaaaaaagcgctagccacaataaatgtcgaagtttcaactgagattaatgccaaagaaacaaacccagttgcttcttttcacgtgaaaaaattcgttgaaaactttctagctattaaaaaaggaatggctgaattagctgaaggaggggacaagaaatgaaaaaaatttcaatgaaagagcgacttgctctagacccccgtgttgctaaagtcttaattagtattacaatagctattttgcttttcccggtaatgggcgattggattgtttatccgacatatgtctttaatgccatttatatcactgctcaaatgacaaaaggggcaacatataaatctagtattgaacgtattgttgggacgatagttggtgggttacttgcagcatttgtatatcttttagtaccaaaccatcactatattatgattccaattggcgcggcgcttgctgttgcgctgagctatcttttcactaaaaaattcacgatggttattgttgttattacggtgatggtattagttggtaaaggagacggggagccgattgtctttttaagagatcgcttatttgatacgatgatcgggctagcgattggttttcttgtttatgccctttatccacggaaaaaagctaaaaaattaaatcaagttttcatctctaaggaaaaagatctactggcaaacattaaagcgatagagattaattctgatgatgctaaagcgctcgcaccgaagattaaaggcttatggaagcaattaattgaactacgaaaaacgcgagaacaaattattactgatagtagttttgttggagatgtaaattcagaagaaccaatgctccaatttaccattttagttgaacgggcgattaacaatattgaaatcctttatcatgtgactttagataaagaggtagaacctgattatgaaattgtctttgattatcatcaacaagcgtgcaaaaaggtgattaatgaaatggaaaccttgattacgaagcatcaataaaaaagatgactgaagcttaatgggcctcagtcatcttttatttttattcagttatatctaaactcttcttaaacatgttaattacacgttctaagtcggtttcatctggtgcaaaataatataaatcgaatccgtatgactcactataaatcatttctccttcacctttaagctcttgcgaatcaacgtttttaagaacggaagaataattggtagccatagaagtaatatctgtaagcgtcatattagtttggaaattatctccaacagctttcattatgctttcgaaattggatacgcctgatgaacttataactttattcgcgataccgataataacgtcgcgttgtctatcttgacgaccaaagtcaccgcgaggatcttcgtgacgaatacggacatattgtaaagcgtccgtcccatttaaagtaatatttccttttacaaatttgctatttacttctgttaaatcaatgtcgttataaactgtaataccaccaactgcgtcaacaaggtctttaaagccttccatattgatagaaataaaataatctaccggaacacctggcattagtttttcaactgctgaaacggttcctgaagggcctccgttcgaataggaagcattgatttttccaatatcgccatttccataatctacttttgtatcacgagggatgctgaccatttcgacagcgttttgttgtttattggctgttgcaaggataattgtatctgctcgaccattcgtttcaccggggcgagcatcagaacccataagtaatacggaaaaaggttttttcttttctaaatcacttgttgttttattacttgtttctaaagggacatttatttttgtaaaagtattttgaacggtgatgtaatacttcgctgccaaacctgtaatggagaaaaagagaattcctaaaagtgtaacgctagcaattttcataactttagtaaaagtggacggttttttttgcttcgtttctgtcctagtttctgtcataaaattttcctcgtctttcttatttagtttgtttaaacataccatcgtctttctgagaaatcaacaaaaaacgataaatgattttgaaaccatttatcgtctttaaaactatacttccatgattataggtaaaatcattggacgtcgttttgttttttcgtacaagaaaggttgcaaagtatctgtaatttcgttcttgatttcagaccattgcgttgttttttgctccattactttatttaagtgacgtgttagaagaccttgagcttctccgattaaattaccggattcacgcatataaataaatccgcgagagatgatgtcaggaccagccatgacacgtgagtttttcatatcaattgaaacgacgacaataacaagtccttcttcagaaagaatgcgacggtcgcgcaggacgatattaccaatatccccaattccgctaccatcaatatagacgctagcagcatggattttaccagcaacatgagctgtctcacttgttaacgcaaggacatcaccgtttgccataatgaaactattttcttctggtacgccacactcttcggcagattcagcatgaattttttgcattctgaattcaccgtgaattggcataaagaatttaggtttcataagacgtagcataagtttttgctcttgttgaccaccgtgaccagaagtatggatattatttactttaccatggataacttctgcaccagcttgataaagtaagttaattgtacggttaacacttgtcgtattaccaggaataggggaagacgagaagactaccgtatcacctggttgaatttggatttgacggtgagtaccattagcaattcttgaaagagcagccattggttcaccttgacttcctgtacaaaggatcgtcacatttcctgctggtgttttattaagttgatgcacatcaataaatgtatcttttggagcttgaatataacctaattgcttaccgatttccatagctgattccatactacgaccgaaaacagcgattttacggccagtttcgatagaggattcaactacttgttgtaaacggtaaatattggatgcgaaggtagcgaagataattcgtccttcaacgtcgcggaaaatgtttttaatactttcaccaacaacgcgttcactcattgtgaaatttggtacctcagcgtttgtactatctgatagtaaacaaaggacgccttctttaccaatttcagccatttttgtcaggttagctggttcaccaactggtgtgaaatcaaatttgaagtcaccagtgtgaacaatattacctgatggagttttgacaacaataccatacgtatcaggaatactatgtgttgtacggaagaatgagatgctagtttttctgaatttaaaaacgtcatcttcttcatattcataaattttagtttgacgaagcaaaccatgttcttctaatttgttgcgaataagagcactcgcaagcttcccagcataaattgggatattaagatcgcgaagtaagtaaggaacgccaccgatgtgatcttcatgaccatgggtgataaaaagtcctttaatcttatctttattttttactagataactgtagtcaggaataacatagtcaatcccaagaagttcgtcttctgggaacttgattcctgcatcaattaaaataatttcgtcttgaaattgtacgccatatgtgtttttaccgatttcgcctagtccaccgagggcgaaaacagctgtctcattattttttacaaatttcatataggcttatttttcccagagcgcgaagtctgggttttccttttcgtaagctaagtgcgcgtcactaattttttcgacaaattcgatgtggaaaggctcatcttttaaaagttggcgtacttttacttcgctttccgcttctacgtataaagattgtgttttttcacgtacgggtgtttctgtaagtgtttcttgataaaatactttaaaaatcatgtttttctctccttaaattttaagtttagtttttaaaaatagattctctggtcgaaaatctaataattattcagtaataattggcttgctttcagttgtggacttagtagcaagcggatatgggtgcacgagatactaacaattaggcataaaaaagacaaagaaaaattaccacagactaatgtataaaaatagctgtgcacgtataacaattttcttatccgttataattgcatacctttattttgggaatttgaaacaaatttccgagtaaaagatgtaattataaactttttttcacgttccattgttgttctataaatgttcatccgatctatatccttctttctaatataccataaatccagataattgctactagaaagtataattaattttgccaaagcccgacagtttgtgattttttggtcgctttctgctataatttaagctaagtgattttaaaatggatagaggattgaggcgtttaattgatgagtaaaattgtatttttcgatgtagatggtacgcttgtaggtgaaacaaaagaaattccagcttcagcaaaacaagcgattgctaaattgaaagaaaatggcgtttatgtcgctattgcaacggggcgcggcccatttatgttagatgaaataagaaaagaactagatattaattcctacatttgttataacggacaatatgttatttttgaagggaaagaaatctacgctaaaccattaccaaccgagtcattagaacgactaattacggtggcatcggagcatgagcatccaattgttttttcaggaaaagattccatgcgtgcgaatttaccagatcatgaccgaattacgattggaatgaattctattaaaagggattaccctaaagtagatgctaattattacaaaggtcgagatatttatcagtgcttactgttttgtgatgagtcgtatgatgcttattaccgcaaagaatttaaacaatatggtttcttacgttggcatgatgtttcagtagatgtttgtccagcagacggttccaaggcggaaggtattaagcagatgatcaaaaaacttggcttttcgatggaagatacttatgcatttggcgacggacttaatgacatcgcgatgctacaagctgttggaaccggtgttgcaatgggaaatggtcgcgacgaagtgaaagcagttgcggattatgttactgaccatgtggatgaagatggcgtttataaagcgcttcagcatctaaaactaatttaaatcaaaagcgaggccactatttcagtgtagcctcgctttttgttgttatttggtcctgttcccatttctgtttaatgaatttaagttgcgcgacgataataatactaataatcacaagtaagtaccaactcgttatttttgagacatgcactggccgccaagcaacaagctgatcaggatacgcccaagcaccgtaaaaactagcaatattttccgcgagatagataaaaaatgcaatacataaaaatgaaaaagataaaggcattttgagctgagtagcgctaactttaaaataaacatatgtttttcggaatagtaggagaactaaaataatcaaaatccaccgaaaatccataataaaatggtgcgtgaaaaaattcgcgtaaatcgctatgcaaagactacttactaaccaaatatttggccaattggtcatgttaagatcaaacctcttccaggcctgacaaatataacttgccacgcttgaatacataaatccgctatacagtggtacgccgaagagtttcattaaaccgggttctggataactccaagatcccatatgtactttataaatttcaagccccagaccaatcaagtgaaaaatcatgataactttaagttcatcccaagtttctaacccaaactttatcaggaaaatttgtgtcacgaggcaaatgattaaaagtaagtcatagcgcgcaataaaaggaatttcaattagttttgtaagggcgagtgaaatgaaaataatgcccggaaaaagacaacaaagtgcttgtttccaagtaaatacccacagtaagcgaaaaaatttcataaaaaaacctctctcatgcttttctctagtttaccaaacataactaaagaaaagcataagaaaaggttaaaaaagttcattttggcggttgatattcgtaaatggtgcttcattttcaaattctaacggcttagtttgtagtttttcaagtaagccgcgaacacgatgttgttctttttgcaataaattatgtaagatttcacgcgagtagggaatgttcaaaaccaaatagtgattttcctctgctgtttttgcaaagtgatttggaaatgcagctaatcgactaatttcgctggaagttaaaaaaggcatatcgacaggaagtatcaggtagttagcttcggggtaagcatttttttgaaccatgacagcgtaaattccaccaagcggcccgaaatctttatatgctggttggtcgggaataatttgaatagctgagtcctcatgaaaaagcgcaattagtttttgataattttcttgatttgcggatacgaaaaccatttcgcaaaatggcttcaacttattaacagtgagctccacccatgttttcccagtcgcctcattctggaaaagggcttttgacttgccaaaacggctagacttcccaccagctaatacaatacccacattaacttttgcgtttttcaagtcgaccatctctcataactaaaatttcttccgtcatcatttctgcttccgaggcataatgcgttacaaaaataactggtatatggaaatctttggccatctgaccaactaatttcatacaaattaaacgtgtttcttcatctagcccattgaaaggttcatcaagtaacagtaatttcggctcagtaatcatcgctcgtgccatcgcaacccgttgtttctcaccgccagaaagtttttgaacagaagaatatagtaggtgcgaaatttgcagataatcactcatttttcttacttgctgctggatttctgcctgttcttttttcttcttttttttcacttttaagccaaacgcgatattttcataaacattcatatttggaaataaagctagattttggaataagtaaccgacttttcgttcagttactggaaggtgtaaggaaatattcgaatcatcccacggtgtcccatcaaactcgataatcccgccgtcgatgctctttaatccactcacacattggaataacgttgattttccagaaccacttgcacccatcatcgcagttactggtttttcaaacgtataatcaatatttaaatcatgaaaaggaagttttttatgaaattgtaatctcagcataattacatccccctcgttaaattactttggcgtacggtcaaaacatgaatgacgagtaacgcaaatacgccgataatgacgttaattagtccaaggtaaatcgcagtacgcatgtcgccttgttgaaccataaaatagatgcttgaagctattgtatcggtttttccttctatgtatccggccaccatcaaacttgcgccaaattcacccatcgcccggcaaaaactaagcaaaactcctgctaaaattggttgccagcagttcggtaaaataatttttgtgaaaatctgttttttattcgctgaaagagtctctgctgcccatacaagttcgtgatcaatcgataaaaatgctgatttaagcccttgatacataattggtaaaataataatcgtcgtcgcaacgatagcaccactaagggaaaagataaaactaaaatcaaatgtatcccaaagcacaccaccaataaaatcattgcggccaagcacattcagtaatactaaaccgaccacagttggcggtaaaacaagcggaagtaaaattaaaatttccacaagtaactgaaaacgtgattttcgaccagcaaaataataactcagtggtaacatcgtcataaatgcgagaaacgtagaaattgtggcaacaagtagtgtatgccaaacagatgtaaacataaaactcctcctgaataaccctctagtacttctattattatcgttctctctggtataaaatgtcaaacttaagtacaatgtaactaaataaaaaagggggatgaacgatgaaaaaaatagcgatacttataagctgcttattagtactacttgtaggtgcatgcgcgaatacttcagagaaagcaaaaacaacaacaactatacatatttcagcagcagcaagcttaaaagatacgatggatgacgtaaaaccacttttcgaaaaagcatatccatctattaaattatcttttgactttggtggttctgggcaaattcgtgaacgcgtggaaagtggtgcgccaattgatggtgtccttttagcaagtaaaaaagatgcagatacattaagtaatcaaaaattagccgaaaacacgaaagaatttgccgggaatgaccttgtgttaattgaaccgaaaaatgctgatcagaaggaaggattaagtttagaacaattactggataatgccgataaaattgccattggagatccggaatctgtcccagcaggcgcttatgccaagcaaactcttggaaatttaaatctttataatacagaaaaagcaaaactcgttcttgcgacagatgttcgccaagttttatcatatgtcgaagcgggaaatgcagatgcaggcttcgtttaccaaacggatgcgattttaagtaaaaaagtacaagtgaaagcgaaaattgatgcaaaacttcatgacccaattgcctactatagcgcacaagtaactgattcagagaaaaaagaacctaccacaacattcctcgactttatgaataaatcagaagcacaaaaaatacttgaaaaatacggatttaaagcagcggattaattagaagtcgctttactttttaaaacgggaaaactcctgtatattggtactaaagaaaacgcatacatgatttatagaagggaagtgcgcccagatgattgaaaaaagaaacaccataagaatggagcaagcgagagaagtattatgtaaccaaataacgcatcttccagtcgaacgaaaaaacgtcacggaagcgttaaatcaagttttacaagaaccgatttttgcaccgtttcccgcgccgtattttagacgttctggttatgatgggtttgcaattacagaagaagatgacggtaattatccgattactttacatgtcgtagcagaggttccttgtggtaaaacatatgataaaccactaaaacccggcgaaacagtgaggatcatgacaggagcaaaagtacctgataacgcctcaaaaattattatgctcgaacaatcaagagaagctgaaaataaaaatgatattgttcttataaatacgcaaaaatctagtaatattacggaaatcggtgccgaatttgcgaaaggtgatttgctcttagaccgcggtcacactctaaatgcaggctcgataagtttactatcatcattcggtatttcggaagtccaagtaattagaaagccaaaagttgctattttatctacaggaagtgaacttgtacctgctggaaattcgctcccagatggcaaaatttataatagtaatcaaccactacttgaaaatcttctaacagtgcaccatgcagaaatctgcgcggctgaacaactaccagataactatgaagatacaaaagcccgtttacttgagctgacgaaaattgcggacttaattgtcactactggtggcgtttctgttggagattatgattttatggcggatattgcaaaacaagaggcagaattactttttaataaaatccaaatgagacctggtagtccgacaactggaatgtggttgaataagacacttattatcgcgctttcgggtaaccctggtgcatgtttcacaggtttttatttattagtagaacccgtactcgcaacctttatgggaaaagataatacggcaactactaaagtccgagcaaaaatggcgagtgattacacgaagaataatggctttgaccgatttttacgaggaacctatcatctatcagaagaaggagagtatttggttgaattggtaggaagtgatatgtcgagtgcgctaggaaaccttcatttaacaacctgtttatttaaaattccaggcggtaaggttggaaaatatcaaggagaagaggtcgaagcatggctactatcctccaaataatcggttttaaaaatagcggaaaaacaaccttgcttaatgcgctaattcgggctagccgcaaagaaaattatacggtttctgccattaaacacgatgcgcatgacttttctgttgatcacgctggaacagattcgtattcttttcaagaaagtggcgcggaagctgttgtgattgcgaattctagacaatatgctgtcatggaacaaactggcattgatttaaaaaccgccattcaaaaactaccggattcagatattgttcttatagaaggctataaagaaggaccttttccaaaaatcattttaattcgagaaaaagcagaaatcgagattttaaaaaatagtaaggccgttcataaaatcgctacgcacaatccagctttaaaagaagaggcaatttttatcggagaagaagaagctttaaacgcgtttgctgaaacgttaatcaaggagtttttacaatgaaatatgtagctttacaacacgaaaaaattgaaatcggaccactttctgaaaaactaatcaataaaaatcacggcggaattaatctgtttgtcggcacaattcgcgaatggactggcgatattcaaacagaagaaattcgctacactgcttatgaagcaatggcgttaaaagagttaaataaattagccacagaagtagaaactaagtggggtgcagatgtagtcatcgtccaccgattaggacttttagaaataactgatatagcagtgtttatcggcgtatcaacaccacaccgggctgcttgttatgaaggatccagatatattattgaacgtttaaaagaacgagtaccaatatggaaagaagaaaaagatgtcgatcaaataaggtggggtggcatagatgctcacaacggttaagtttttcgcttttttagctgagaaaacaaagcaaacagaagtaaagttaaatttacagcaatgcgaaacagttggtgaagttcgggaagtcattagtagtgaatttcctgaaatcgctgtggatttggcaacgtgtatgttggcagttaatatggaatttcaacacgatcaagatattttgccaaatgaaataacagaaatcgcggtaattccaccagttagcggtggataaggaggatactagatggataaagacgatttaacccattttaatgatgaaaaacgtgcgaaaatggtcgatgtcacgagcaaatcagaaacgaaacgacgtgcaatcgctagagctaccatacatatgaacgaagaaaccttagcgcgtattcatgctggtaaaattgctaaaggagacgttttggctgttgcacaagtggctggcatcatggccgcgaaaaaaacgagcgaacttatcccgatgtgtcatccaatcatgacaaccaaagccgatatttcttttgatgatgatggaaagacggcattaacgatcacatcagaagtagtgactgttggaaaaacaggggtagaaatggaagcactgacagcagttaccattgcagctttaacaatttatgatatgtgtaaagcaatggataaaggaatgcaaatagaaaaaacatatttagtcgaaaaaacaggtggaaaaagcgggacatttaaagcagaagcgtaactattttgtaggataggagttttgttttatgcaattattaaaggataaatttgggcgggtacacgattacattaggatttcagtaacagatcgatgcaatttaaggtgtgtgtattgtatgcccgaagaaggcctgacatttttgcctcatgaaaaagtactatccaaagatgaaattgtcagttttatggagttaatggtgaaatttggcatcaaaaaagttcgcatcacgggtggagaaccattacttagaaccgatattgtggaaattgttcgtggacttggagcaattcctgagatagaagatatttcgattacaacgaatgcgatgtatttggcaaaaaaagcagaggccttgaaagaagccggattaacacgtgttaatattagtttggattccttgcatgcagaccgtttccaagcaattacacgtggaggccgtttgcaaaaagtactcgatggtattcaaaaagcggaagaagttgggctattcccaattaaactaaatgttgttttaatcaaagggcaaaacgacgatgaaataacggatttccttcaatttacaaaagataaagacattaatattcgctttattgaatatatgccgattggtcatgcgggtacgagttggaaagaaaagtacttacctctagatactatttttaaagcgtgtgatgatgctagtttcgaatatgagccagttgattcgattcgcggaaatggtccttctgaaaacttccggattaaaggagcgaaaggaacatttggtgtaatacatccagttagtgcgcatttttgtgatagctgtaaccgattgcgactcacggctgatggctatattaaagcatgtttatactgggatgaggaaatgaatattcgtccatttatacatgaaccagtaaaattaatgcaacttgttcaaaaagcaattgataataaaccagaaaatcatgaaatggcattgaaattacaagatgaagttcaatctaataaaccaacttggcgacgtatgagccaaattggtggataaataaaaccatccggcccgcgagccggatggttttatttttgtcgttccgctattaaatgcggcaattcaggtataattaatttttccgtagcgagtctcgaagcattacttgaccccggtaaggcaaaaatcagcaaaccgctcttcgaaaaacctgcaaaagcacgagataccatcgcgcggctaccaacttcctcgtaactaagcatccgaaaaatttctccaaaaccaggaatttcttgctgaatagttgcgaataaagcttcataagtaacatcgcgcttagcaattccagtaccgccatttgtaattaaacaaaaggaaccgttagctgctaatttgtccatttcctgttttatacgaggggcgtcgtcaggaacaataactcgtgtaatcacttggtgtcccgcagcctctaacaaagattgaatcagtttgccgctcgtatcggtttctaaattccttgtatcactaatcgtcaaaatactacaagttaccttaataaacgttttttgctccataacttcctcccttaattaaaaaatagttggtatattttctttgcttccgctaaattttcagttccatgcagtaaaacacgaccatttttaaaaataacaaattgatatttttcataattaaaacttagtaaagctggattttccgtataaagcattttttgttccgctaatcgttgttttatttcgcggtagttacttttattttggaggtgaaactgtacggtatctcgtccacaaagtgcgatagtttgctcagaaaagggaacttctgaaagtactttttcaggtgagcagcctgtgcagtgagggcgttttttgacagctagtgattggaaattcaactgccaattatctatttgatagtatgtatttgcagtgaaatcagggtttaaaatcatttgtgtaagtaacgaaacttgcattcccgcgaccatcggaatgagcgcgccatcaactccaataatatcgcaacttgcagcatttgtttggggaatatcaccaagcaaacagtgtaaacaagcagaatcaggaggggtaatcggcataagattagcataatttcccgcacaagaagtaaaaatccaaggaatttgatggataaaacaaaattggtttaaaaaatcgcgagtcataaaattatccgtacaatcaagtatgtaatcaattttcttagcaaaaggggttaaacttgtcatattcgcatcgtcaacaatatattccacttcaatctcgctattaattaacaatattgctttctgagctgcatacgcttttgcttgtttctcgagcgcatcttgttccgtataaagtgattgtcgttgtaaattacttaattccacataatcgcggtcaattaaaatcaatttcccaaaacccatgcgcgcacaaatctcagccgcgtaggaaccaattgccccaacaccaacaatcagaatcgttttcgaaagcaatttctcttgaccgatttcacctatatttgcgactcgcatttgtctatcataacgttccaagttttccaccttctttcctatttatcttaccagaaaatcactgcaagaagctatctacgaggttccgatttattcttgtaattccacttcacgaactttataatagaaagaaaattaaaacctagaggtgctaactatgaaaaagaaactagacacaaccaaattttaccctgcttatccagtttttctattaacttacttaaatgaactaggagaagcgcaaatgtcaacgggatcatcatcgtatacacttggagatactttagtcattggtatatctgccgaaagtaacgcgagcaactatttaaaaccgggagagaaattcgccgtgaattttccgaccactaaacagttcgatttaattgaacaaggtggcttttcatccggaaagcgtatcgataaagtaaaagaataccagattgagctaaccaaaagtgaaagcggagcactatacatagattcatgcccgattatttttgaatgtacggtaggtcaaacgattagagatgctgactatcatactgtttttgctaaaattgacacgcgtttaatggaggaaactttaattgatacagctggtaatttcgtacatgatgaactagacttagttcttttttcaggcgatgcttatgaacgtaaatttcgcaagttagatataaaaatagaaaaagttggcggacatttataaaataaaaaccccacaggatatagattcctgcggggttttattcatttcatccaaatacatccacatcaggtggcaagtaagatggattttctttattaatatggtcataaaacataacgccattcaaatgatcaatttcatgttgcacaacaattgctggatagcctttaaaacggagcttaagtggcgtaccattttcatcaaaggcatcaattgtcactcgttcactacgtacaacataaccaggaacttcacggtcaacggaaaggcaaccttctccaccagaaagacaagcttgttgtacagaatggctacgaatttttggattataaagcacataactataaagacgatctttttcatcgtgtacatggatagctaggaaacgttttgttacagctagttgtggagccgcaattccaacaccaccacgcaaaccgtatttttctgctaactcttcatcctgactattaattagaaactcgagcatatcgtgccctaattttttttcttcatctgaaagcgggaaagtcacttctgttgcaacttcgcgaagtgctggatgaccttctcgtacaatatcgtccattgtaagcatgatttgattctctcctgttctttaataacatatccttattttaacaaaagaacgaaaaaaaaggaatgaaatattactttccaagaaaaaaccgtgttttcataggactaaaggcatatttgttaaaaatagcaaagtttaaataacgaacatttataaataaaatagatatattgttcgtataaatgaaacggtaaaaaattttataagtttgtgaattcacaaactaacaatattttataaataaaacttcggaataggtgtgataatgcgagagttgcaatattatataacagtttgcatctgttttatctttttttaatacagaactggaaagcgaatgatttaagttataatgccattgtaagcgataaaataattagagattaacttattgacttcataatcttggtagtgtaaattaagagagaagattagtgtattaataaaattcttgtttttgagtaaaacagaattaacattttaaataaaaggaaagttcctgtttttttatgaaacattgtgaaggaatgaatgttttttcacaaactctcttaaaacccatgttttcaatgaggattttgtggtaataactggagaggctgcgtaattagttgataggaatttagaaaaaagcttccggaatctgcttctttctatagaataacttttctttttactacgctattataattaatacacaatcaggatggcagttttaaaagaatccatttagatgggtaaatgaccggacgagcgttacataaaacgcatacctaactaatgaagaatttgaaactgtacaatgtgaatgacgaaagggtggatacgaaatggcttctaaaacaaagaaggctattatcgacgtaaagaaacaatttgaggctgttcataaacaatttgaattagttcaaattctaaatgaaaaaggagaaatcgtaaatccagatttaatgccggatttaactgatgacgagttagtagaattaatgactcgcatggtttggactcgtgtacttgaccaacgttctatttcacttaaccgtcaaggacgtctagggttctatgctccaactgctggacaagaagcttcccaacttgcaagccactatgcacttgaaaaacatgattatattcttccaggttaccgtgatgtgcctcaacttatctggcacggacttccacttacaaaagcgttccttttctctcgtggacactttgtaggtaaccaattccctgaagatttaaatgtattatcaccacaaatcatcatcggtgcacaaatcgtgcaagctgccggtgttgctctaggtcttaaaaaacgtaaaaaagacgctgttgtaatcacttatacaggtgacggtggttcttcacaaggtgacttctatgaaggaatgaactttgcgggtgcttaccatgctccagcaatcttcgtagtacaaaacaataaattcgcgatttctacacctcgtgaaaaacaatcagctgctgaaacattagctcaaaaagcagttgcagccggaatcccaggcgtacaagtagacggaatggatccacttgcagtatatgctgtaactaaattcgctcgtgaacgtgcagttgctggtgaaggcccaacattaatcgaaacgatgacttaccgttatggtccacatacactttctggtgatgatccaactcgttaccgtacaaaagaacttgacggagaatgggaacttaaagatccaatcgttcgcttccgtactttcttagaaggtaaaggcctttggaacgaagaaaaagaaaatgctgttatcgatcaagctaaagaagaaatcaaagtagcaattaaagaagcagacgctacaccaaaacaaactgtaactgatcttcttaaaaatatgtacgaaacaccaactgctcctatcaaagagcaactggcaatctatgaagcgaaggagtcgaaataatcatggcgcaaaaaacaatgattcaagcgattacagatgcgcttgcagtagaacttgaaaaagacgaaaacgtattagtttttggggaagacgttggtaaaaacggcggcgtattccgtgcaacagaaggattacaagaaaaatttggcgaagatcgtgtattcgatactcctctagcagaatctggtatcggtggtcttgctatcggtcttgcacttgaaggtttccgtccagttccagaaattcaattcttcggtttcgtatttgaagtaatggattccgttgctggtcaaatggctcgtatgcgttaccgtacaggcggaactcgtactgctccaattacaattcgcgcaccttttggtggtggagttcatacaccagaaatgcacgctgataacttagaaggattaatggctcaatctcctggtttaaaagtggtaattccttccactccatacgatgcaaaaggtcttttaatctctgcaattcgtgataacgatcctgttattttcttagagcatatgaaattatatcgttctttccgtgaagaagttccagaaggcgaatacacagtagaaattggtaaagcagctgttcgtcgtgaaggtactgatgtttctatcatcacttacggtgcaatggtacaagaatcaatgaaagcagcagaagctcttgaaaaagatggcgtatctgtagaagttatcgatttacgtacaattagcccaattgatgtggaaacaatcattgcttccgttaagaaaacaaaccgtgctgtagtagttcaagaagcacaaaaacaagcaggtattgcagctaatatcgttgcagaaattaacgaccatgcaatcctttctctagaagcaccagttatgcgtgttgctgctccagatagcgtattcccgttctctcaagcagaaacagtttggttaccaaatcataacgatatcattgaacgagtaaaagaagttattgcattttaattcataatgaccgttttaaaacttatggggagttttagaaggggaaagaaatatttttatactaaggttcagtttatctgaaccttagaaattacaggaggcttaataaaatggcatattcatttaaattaccggatatcggtgaaggtatccatgaaggtgaaatcgttaaatggtttgtacaaccaggcgataagattgaagaagatgaatccctatttgaagtacaaaacgacaaatcagtggaagaaatcacttctccagtttcaggaacaattaaagaaatcaaagttgctgaaggtacagttgctacagttggacaagtactagtaacatttgatggcgtagaaggtcacgaagacgacgccgaagaagaaagcgcagcaccaaaagcagaatccacagaatcaactccagcacccgcacaagctagcggaaaaggaatttttgaattcaaattaccagatattggtgaaggaattcatgaaggcgaaattgttaaatggtttattcaaccgggcgataaagtagaagaagatcagtccatttttgaagtacaaaacgacaaatctgtcgaagaaattacttctccagtagatggaactgttaaagatattttagttagtgaaggtacagtagcgacagttggtcaagtattagtaacatttgaaggcgattttgaaggagaagctagtcatgaatctactccagaatccccagcagaagaagctgaacttacaaacaacgatgcaacttccgctccagctacaggtggaaacggaactccatcatctaaaaaagatcctaatggccttgtaattgcaatgccttctgtacgtaaatatgctcgtgaaaaagacgttaatatcgctgaagtagcaggctctggaaaaaataaccgcgtagttaaagctgatatcgatgctttcctaaacggcgaacaaccagctgcagcaacaactactgctcaaacagaagaaaaagcagcagcaccaaaagcagaaaaagcagcagcaaaacaaccagttgcaagctccgatgcttacccagaaacacgcgaaaaattaacaccaactcgtcgtgcgattgcaaaagcaatggtaaactcaaaacatacagcaccacacgttactttaatggacgaaatcgaagtaactgcacttatggctcaccgcaaacgtttcaaagaagtagctgccgaaaaaggtatcaaacttactttcttaccttatatggtgaaagctcttgttgcaacgcttcgtgacttcccagtgcttaacacaactttagatgatgcgacagaagaacttgtttacaaacattacttcaacgttggtatcgcagcagatacagaccacggtttatacgtgccagtaattaaaaatgctgataaaaaatccgtattccaaatttctgatgaaatcaacgaactagctggaaaagcacgtgatggtaaattaacagctgacgaaatgcgccacggttccgcaactatttctaatatcggttctgccggcggacaatggttcactccagtaattaattacccagaagttgctatcctaggtgttggtcgtattgctcaaaaacctatcgtaaaagatggcgaaattgtagcagcaccagtactagcgctttccttgagctttgaccaccgtgtaattgacggcgcgactgctcaaaaagcaatgaacaatattaaacgtttattaaacgacccagaattattactaatggaggtgtaacaaaatggtagtaggcgattttccagaagaaagagacaccatagtcatcggtgcaggcccaggtgggtatgtagccgcaatccgagctgcacaactcggacaaaaagttaccattattgaaaaagaatattacggtggtgtgtgcttaaacgttggatgtattccttctaaagcacttatcacaatcggtcaccgttttaaagaagctggacactctgataacatgggtattacagcggacaacgtgaacttagatttcacaaaagcacaagaatggaaaggcggcgtagttaacaagcttacatcaggtgttaaaggccttcttaagaaaaataaagttgaaatgttagaaggagaagcgttcttcgtggatgatcattccctgcgtgtgatccaccctgactccgctcaaacttatacattcaataacgttatcattgcaacaggatctcgtccaatcgaaatcccaggtttcaaatatggtaaacgtgtattaagctcgactggtgcacttgcattaactgaagttccgaaaaaattagtcgtaattggcggcggatatatcggaacagaactaggtggagcattcgctaaccttggtacagaactaactatccttgaaggcggtccagaaatcttaccaacatacgaaaaagacatggtttccctagttaaacgtaatctgaaaagcaaaaacgttgaaatggttactaaagcacttgcaaaatctgctgaagaaactgaaaacggcgttaaagtaacttatgaagctaacggtgaaacaaaaactatcgaagctgattatgttttagtaacagtaggtcgtcgtccaaatacagacgaaatcggtttagaacaagctggcgttaaagtaacagaacgcggtttagtagaagttgacaaacaaggtcgctctaacgtttctaacattttcgccattggtgacatcgttcctggtgttcctctagctcacaaagctagctatgaagcaaaaatcgctgctgaagcaattgctggcgaaaaagcagaaaacgattatacagcacttccagctgttgttttcagtgacccagaacttgcaacagttggtttaacagaaaaagaagcaaaagaaaaaggctttgatgtaaaagctgctaaattcccattcggcggtaacggtcgtgcgctttctttagatgcacctgaaggatttgttcgtctagttactcgtaaagaagatggcctagttatcggtgcacaagttgccggaatgaacgcttctgatattatttcagaaatcggcttagcaatcgaatcaggtattacagctgaagacatcgcgcttactatccacgctcatccatcccttggagagcttacaatggaagcagctgaacttgctttaggtcgtccaattcacatgtaatcaacttaaagcggaagtatcctttacgggtatttccgctttttatctatataaataagtgcgtgatttcacaaaaactcttttagttcattttttgaaatatttaaagtatccgttttagaaaaaaaggagtataatgtaacaagtgaacgtaacaagtcaaatctaattgaatcaggtgaaaaaatggagaaacaaacagcaacttggaagaaagctctattttggtttgcgtatgtagtagcaggaatttgttttttattaacgattgtggcctttattgtaggatttattcatcacatgcatgatacaggtggatggcgttccgttattcaaattctcgaaaccccaattacgggctttgtaaaaatgactggtggctacatcggtaaaggaatcttagaagtaattattcttattatcgttagctatgtattaccaatcttcttctgttttgcaacgcattatttaaaagtaaaacgacgtgaaatggcttaaaataagattattttgtaaaaagcaaagcgaatgagcattgctttttatttatgcggtcaagttattttatttttgccgtagaagcatgctaaaataacaataagagacttgatgaggaggagacccatatgccatctaagaagaaaaagattgtcgttatcggcagaagtaatctacaaaatctctacattcatacaattcttttaaaaaaactacccgctgagatttacttaatagatgaacaagctaaaacaagtgtgcaagactttgaatatgcgagctactatcattcttcagcaaccgttaacacaggaacctttaatgaatgtcgaagtgcggatctcgtccttttttttcaagaagaaatgtcaaatgagtctttctcaaatgaagataatttagcattaatcaaagaaaaagtgaagaagatgatggcgactggttttcaaggaatagtgttagtggcgactgccgaaagtaatattgttgcttccttaattaaacatttttctggcttaccagcaaatcaaattattacacctggcaccatgctagcaacttcttattttcaagtagaaattgctaaactatttaaaatcagtcctaaaaacgtgcatggctatattattggagagagtactcaggatgtcattcccgtttggagtcgagccttccttggtggcaaaccgattttaagttatttagccgaagaacaaaaaagaatcacatcggatgatttacaaaatttaacaaacatgattacaaaaattcctgattttcctgttgaaactaaagatggctgtagtttccgctttagtactgtaactgtgctcgctgaattaacagaagtcattttacgagatgaagcaagggtgcttacagtaggcgtagaagtgaaggaagcatatggtttagaaagaccagttttcgttagcgtaccagctgttgtgggcgctgagggagtcagagaattactggagttaaatctatccgatgacgaacaaaaagaattaaagcgaattacaacaaaaactaccgagaaattggggttactgcataataagggaggaattagttaatggaatatagttatccactaaatccagactggacaaccgaagaaatgacgattgttgtacaatttttagaagctatcgaacgagcatatgaaaaaggtattgatacacttgaactcaaagaaaaataccgagcatttaaacaagtagtacctgcaaaaggagaagaaaaacggattggcatagactttgaaaaagcaagtggatattcagcctataaagtcatgcaactcgtaaaaaacgcaacaacaagcaaaataaaaatgcaaccataattaagaggaggaaatttttcatggatattagtcaaattaaagcagaagtagtaacaccagaaacaggaatacacgtaggtgaaaagggagctccagttaaagtaatgtcattcattaacctacgttgcccattttgtcgtgagtggaatgaaaaatctaaagacgtcttaactgaatatattcaagcaggaaaaatcgaattaatcattaaaccatttgataaagaaaaagaatctttacaacgcggaaatgtagcgcatcgttacttagattattctaaaccagaagaaacgcgtgaaaccatcaataaaatctatagcacccaagatgaatggggtagcctaagtctttcagaagtagctgattatatggagtctacactaggcctaacagagcaagacaacaaagctgcatctgaaaaaataatcgctgaagcaaacgcagcaaatgttgtttttgtaccgactgtaattgttggtgaacatatttttgatgaacacattagccctgaagagttacgcgacttacttgacggcgaattagctaaataaaaaaacgaatgtattgcctatcaatttaggcgatacattcgttttttattttaaaagaatttcctccgccagaatacaatcgcaagcgctccggcaatcccaaaagcaaaaccaagcgttaatatccaagctaaaggtgtttccataaacggtaatttcacgttcattccataaaaactaaaaaccatcgtcggaatcgtcaaaatgatagtaaaagaagtgagaaatttcatcacgatattcatattgttggagataattgaagcataagcatccatcatcccacttaaaatattcgagtgaacttccgccatttcgattccctgacgattttcaataataacatcttctagtaagtcttgatcttcctcgtacattttaacgatattttgacgcatcattttatcgagtacgactttattcgatttaagggctgttacaaagtaaactaaacttttttcaattcccattaaatcataaagctgtttatttttcatggattcatgtagttctttttcgatttcatctgtttggcggttcaagcgttttaagtgacgcaggaacgtagttgaaatcatatatagaatttgtaaggcaaatcgtgttttcatgtgcgtataaaagcctttaatacggtttctaataaatgattgtacaatagaagaatcaatcgtacaaatcgtaataaagtagtcctttgtaataataatccccatcggaatcgtttcaaatgaagcgtaatgaatatcatcttcatcaactactggaaagtcacagacgattaaaacggaatctgaatcatcatcgcgttcaatacgagcactttcatctttatctagtggatcttctaagaactccaaagggatttcatagttatcggcaattttattaatttcttctgaagtaggggcaacgatattaatccaacagttgcgtgtcacttcttctaattcaattaatttgccgttttcatctgatttgaaaatttgatgcatgctttttacctccttttttaacaggtaaatttcacgcggttagagtatcgttcccgtgaaaaatcacctgtatgaatacttcgatgtggaccagggtcacttgctgtttgctgctcctttttcacgttcctcaactccttcaaaccatagtaattcacaactctaccattatacctagattatagtcatttgtacatcttttattgaagagcagccttataaagcggaataagctcatcaagtaccatttcagcctctttgatgaagtcttttccaggggataaatggttatcgtcaggtagataaatttttccaaccaaaaattcacctttttttacatcacggaaacgtttaagcgttgcgtcaagttgaccgccgtgcaccgggtaagttttctcttccgtatggtctggcgaaatcgcaaatgtatcaggtaattcagcaagtagtttcttttctttcaaaaagcgattggcgatttttgtgctttcttcattttcataaataaaagcgagccagatgaacaaataattatcaaaaagtcctacttgaaaatgagggtgctttttataaccgcgtttatcgtggcaaatcgcaagccatgtgctttcaggtgggttaaccgaacgtctttggtgacgagcaatatgtaaaaacatttcatcgccaagtttggcacttaaataagtagttaattcttccccaactgctttaaatttcggctgaatatcattttgaattccagccatacgtgcgtccagaccaggaatttgcattgttttaaaatctttcttactaaatcctttaaaagtcatctgttttcctcctaattttgcatatagtttcattatacggaagttaagttctaagtgaaagaatcttgttctattcagataattcatttttgtgataaaataaacaaaacgagtctaaaagaggtgttagcatggacagcgaaaaaatagattatttagcaaggttatggattatggaagcagcagcaaaaatcaaacaatcttttaaagaaacattagacattgatataaagtctggccgaaatgatttagtgacaaacatggataaagaaacagaagctttttttgtcaaacaaatcaaagaccattttccaaaccatcgcttatttggagaagaaggtatgtcagatgatgtgaccgatttaaatggaattgtttggattcttgatccaatcgacggcacacttaattttgtggagcaacaacgagattttgccatttcacttgcaatttatcaagatggagtagggcacttggcttatatttatgatgttactcgtgatgaactatacttcgcggaaaaaggaaaaggcgcaacagtaaatggcaaacaaattcctaaaatcgataaagacatggatttgcaagatgcactactaattgccaatctaagtgtgacaagaaaatttccaactatgtgggaagccgtaaaagtctcaagagggctacgacttcacggagcagcttcacttgaatatatggacgttgcaaccgggcgagcaggggcatatctttcggctaatttagctccgtgggatattgctgctggaaaaattatcgtggaagaattagggggaattgtcacccgaattgacggctcaaaaatcaatatgctggaaaaaggaagttccatcgttgcaacaccaaaaattcatcaaaccctattagacaactacctgccttaaagaaagcgctcaacataaaaaaactcattttcagaaaataaaaatagtgctaaatccgcttagctatgctataataggtaagttgatttaaacgagacgatagcgacggaggaaaataaatctattttcctctttcttttggctaatcttcacgataaatgtttggatttttaatttaggaggaaacaagattgaatttaagaaacgatattcgtaatgtagcaattattgcccacgttgaccatggtaaaactacactagtagaccaattactacgccaatcaggtactttccgcgacaatgaaacagttgcagaacgtgcaatggacaacaatgatttagaaagagaacgcggtattacaattttagcgaaaaatacagcaattaagtatgaagatacacgcgtaaacatcatggatacacctggacacgccgattttggtggagaagtagaacgtatcatgaaaatggttgatggtgttcttttagtagtggacgcgtatgaaggtactatgcctcaaacacgttttgtactaaaaaaagcactagaacaaaacctaactccaatcgtagtagtaaacaaaattgaccgtgactttgctcgcccagaagaagttgttgatgaagtactagaattattcatcgaactaggtgcgaacgacgatcaattagaattcccagttgtttatgcttctgcaattaacggaacttcaagctttgaatccgacccagcagaacaaaaagaaacaatgaaaccacttttagacactattattgaacatattccagctccagttgataacagcgacgagccattacaattccaagtttctttacttgattataatgactatgttggtcgtattggtattggccgcgttttccgtggaacaatgcacgtaggacaaacagttgccttaattaaactagacggcacagtaaaacaattccgtgtaacgaaaatgttcggtttcttcggactaaaacgtgacgaaattaaagaagcaaaagcgggtgacttagtagcacttgcaggaatggaagacatcttcgtcggtgaaacagtaacaccatttgaccaccaagaagcacttccacttttacgtattgatgagccaaccttgcaaatgacttttgtaacaaataacagtcctttcgcaggccgtgaaggtaaacacgtaacaagccgtaaaattgaagaacgcttacttgcagaacttcaaacggatgtatctttacgcgttgaaccaacagcttctccagacgcatgggtagtatctggtcgtggtgagcttcacttgtctatcttaattgaaacgatgcgtcgtgaaggttatgagttacaagtttctaaaccagaagtaatcatccgtgaaatcgatggcgtgaaatgtgaaccagtagaagacgttcaaattgatactccagaagaattcatgggttcagttattgaatctatcagccaacgtaaaggcgaaatgaaaaacatgattaacgacggcaatggccaagttcgtttacaattcatggttccagctcgtggattaatcggttatacaactgatttcctttcaatgacacgtggttatggtattatcaaccatacattcgatagctaccaaccaatccaaaaaggtcgcgttggtggacgtagccgtggtgttcttgtatccatggaaacaggtaaatctactacttacggaacaatgcaagtagaagatcgtggtactatttttgtagaaccaggaactgatatttacgaaggtatgatcgttggagaaaacaaccgtgaaggcgatatcgctgtaaacattgtaaaagcaaaacaaatgactaacattcgttctgctaacaaagaccaaaccaacgttatcaaaaaacctcgtcacttatcattagaagaatcattagaattcctaaacgaagatgaatactgtgaagttacaccagaatccatccgtttacgtaaaaaaattctaaacaaaaacgaacgtgaaaaagcagcaaaacgttcaaaaactgctgaataattaatttaaaaataagccaaatagtttttttagagatattagtatcttttaaaaatttatttggctttttttatgcattaataggaggaaaacagggaataaaataatgtctttgtaacactattgtaatatgaatagctatttggtatattataagtaagtagaaaaggtggttattattatgaaaaaacggataattattcttgcagtattagtggtacttcttatcggtggcgttgtaattggagtttatgcaaatggaaacaccgcaaaagataatgaagataaaaaaacaacagcaaaaaaagccacatctacaccaaaagatacaaacaaaacagttgatactgagaaaaaagatacagtaaaagactctgtaacagatgataaaggtgtagtaactaaaggtagctcagatattgaaaaaaatgcaccgacaaaaagcagtggtaattcaacagaatcaaataaaaacactccttcaacaccagcgttttctctatctaccagtggatttaaaacatctaatgtagcatctgtacttggcggaacagtgacaacaacttatttgtccagtagtccgtcatttcaaaaaatctttcaaaatttaaccattgatgttaaccagtacaaagtagaacatgttgttggagcaaacaaatcagtaagtgcgagcaatccagaaagttatttagcaaataaaaatggttacgttattacattagatatttctatcaaaaacacatcttcgaaagataaaatgtataaagccgatcaaattacccttgtaggagcaaatgaatttgtaggaggaagtttagataactttgtaccttctaatttccatcttatcggaagtaaatctgatcccaataacttcgcagccggtaaaacagcgcgtggtctattaactttcacaatgactgaagctgtctataatgatctagcagctgactcgaaactcggtgtaccaaaccctgataaatttgattcaactgtttcagaagcaaaagctggcgacgacgttgttgtttcctttccagtaaaatagaaaaaaaccgcccagttaattgggcggtttttttatttctccgtactttctattaaattctttaactcactattcgacattacaactggtttatggaaattaaaatgaccagaattcacgcgactgatagttttaatagctacacgatgttcacattcaggacataaatacattctaattggtttattacgtaattgctttgttttaaattcacgattgtctagttcgtctacacgctcgcataagatacattttgcattcaatttatcttcacctcacacaagtattatagcacgattatcgaaaaaggcgagtaaaagcggatttttcaaaaaattttagcctattcttgcttgcgtggcttttaatttgtgatatactagacttatctagtattaaattttacttaagggttctcttaagatgaaaataaagcgcttattatagcggatgatagggggttctgtgatggcaaataaaaagatagatcacagagaagaggcaattgagcttttaaaacaagacgcaaaacgaatcttacagttgattaaagttcaaatggataatttaacattaccgcaatgtccagcatatgaagaagttcttgatacacagatgtatggcttatcccgtgaaattaattttgcaacccgcctaggactaattgaaccggaagaaggaaaaaaattaatttccacactggagaaagaattatccgcgctacatgaactttccatgagcaaaaaataatgatttaattgaaaagatgtctgattctttctgacatctttttttgtttggcaggaaaaatgagccaaaagaaggaggcaattcttcttttcatttgaaggctttttcctttataatagaaagaatagaatacaagatgggatagtaacttctcagggattggaagatgccaatgttaaaacgaattttaaaatcatatgattatgcatttattgctgtttttatagtgctttgtttatttggaattataatgatttatagtgcaagctggtctctagctattggtaaagatttacctgctgactactattatgcacgccaagtaaaaaactttataattagttttattttctttgttctttttgcgcttatcccttttaagttttatcaaaacaataaagttcttatgttaattgtatttggctcaatcggtgttttgttactgattttcttagttgggaagacggtgaataatgcgaatagttggctagtagttggaccacgttcacttcaacccggggaatttgcaaaattagctgtcattatttatatgtctgcaatttatgcgaaaaagcaaagttacattgatgactttaaccgcggtgttttgccaccaatattcttccttgcttttgtttgtttcttgattgcgattcaaccggatacaggtactgcgtttattattttccttgttggttgttgtattattattgcttctgggatgagacttcgaacaattatgaaactaattggaattggagtcggggtcattgtcgcccttacactaattttgttcgctttaccagataaagtcagaacggaaatcgtatcaccaacaaaagtagcgcggattacgacctttatgaatccgtttgaatacgcagataaagaaggacatcaactaattaattccttttatgcaataggttcaggtggtgtttctgggcaaggtctcggcgaaagtgttcagaagctaggctatttacctgaagcgcataccgattttattattgctgtagttgcagaagaattaggtgtgtttggcgtaatgttcattattttagcgctgtttttcattatttttaaaacgatttctaccggactcagggcgaaagatccttttgcttcattaatgtgctacgggattgcaagtttgattgctattcaagcatttattaatttaggcggtgcaagtggacttatcccgctaactggggtaacacttccatttatcagttacggtggttcttcattaatggttctttccatgatgcttggaattgtagcaaatatttcgatgtttaataaatatcaccgtttgtatagtgcagatggttctaaaaaagaagttcccaaaaagcaaaaaagacgatagatttcaaaagaaaaagtcatttaattggctttttcttttttcgttttaccgattgtttttggcggtttatagccagtttattcgtgttttcgatattgttttaaatatttagaaagaaaataatttacatctgatggcatttaatactataattgaagttatataccgttttacagcctaaaaaagggagagcttaaaagtatacataatcatttcgtccatttaggcatcgtatcaagtatagaacagatcagtgttggttaggaggaaaaaaatgaatcgaataaaaaaagtattagtagcaaaccgtggagaaattgctatccgcgttatgcgtgcatgtactgaactcaaaatcaaaacagtggctatttattcacaagaagatactggtagttttcaccggtataaatcagatgaagcctatctggttggagcagggaaaaagcctattgatgcgtatctagatatcgaaaacatcattgaaattgctaaagaatctggtgcagacgcgattcatccgggatatggtttcttgtccgaaaacattgaatttgctcgtcgttgtgagcaagaaggcattattttcgttggtcctaaatcaaaacacctagatatgtttggcgacaaaattaaagcaaaagaacaagctttattagctgatattccagtaattccaggcagtgatggtccggtagctggtattaaagaagtagaagaattcggtgaaaagaacggctatcctttaatgattaaagcttcccttggaggcggcggtcgtggtatgcgtgtcgtagaatcaaaagaacatgtgaaagaaagttttgaacgtgcgtcttctgaagcaaaagccgctttcggaaacgatgaagtatacgtagaaaaatgtgttatgaatccaaaacatattgaagtacaaattcttggtgacactcacggtaatatcgttcatttatttgagcgtgattgttctattcaacgccgtcaccaaaaagtagtggaagttgctccgtgtaatgcgattacttctgaacttcgtaaccgtatttgtgatgcagcagttaaattaatgaaaaacgttgattatatcaatgcgggaacagtagaatttttagttgaaggcgataatttttactttattgaagtaaatcctcgtgtgcaagtagagcatacaattactgaaatgattacagggattgatattgttcaatctcaactattcattgcagatggttatgcgcttcacgatcagctagtggctattcctaaacaagaagacatccatattcacggctctgcaattcaaagccgtattactactgaagatccacttaataactttatgccagatactggtcgagtagacacataccgttctacaggtggttttggtgttcgtttagatgctggtaatggtttccaaggaacagtagtaacaccgttttatgattctttacttgtaaaattatgtacttggggcatgacatttgagcaagcaacgcgcaaaatgcgtcggaacttaattgaattccgtatccgcggtgtgaaaacaaacattcctttcttattaaatgttgttcgtcatccggattttgcaagtggtaattataatacaagctttatcgatactacgcctgaactatttaaattcccacatattcgcgaccgtggtacgaaaacgttgcgctatattggtaatgtaacagtaaatggcttcccaggaattaagcaccgtgacaaacctgtatacgcagagccacgtttgcctaaaattccttatggttcgcaaatcgcaccgggaactaaacaaattttggatgcaaaaggaccagaaggcgttgtagactgggtgaaaaaacaagaagaagtgcttttaacagacactacacttcgggatgcgcaccaatctttacttgcgacacgtgttcgctcgaaagacattttccaaatagcagatgcgatggctcatttattaccaaatatgttctcatttgaaatgtggggcggggcaacttttgatgtagcttatcgcttcctaaatgaagatccttgggtgcgcctggaaacacttagaaaacaaattccaaatgtaatgttccaaatgctacttcgcggagccaatgctgttggatacaaaaactatccagacaatgttattcgcgaattcgttaagcaatcagcgcaatccggtgtcgatgtattccgggtgtttgatagcttaaactggatcaaaggtatggaagtgtcaattgatgctgttcgtgaagcagggaaggtcgtagaggctactatctgctatacaggagacattgatgatgacacaagaacgaaatacacgattgactactataaagatatggcgaaagagctcgttgctcaaggtacgcatattttaggaattaaagatatggctggacttttaaaaccacaagcggcttaccgtttaattggtgaattaaaagatacagtagatgttccaatccaccttcatacgcatgacacaagcggtaacggtatttatacgtatgcagcggcagtcagtgcaggtgttgacattgttgacgtagcatcaagtgcgatgagtggagcgacaagccaaccaagtatgactggtctttattacggattagttaatggtaatcgtcaaaccaacctagacgcacaaaactcccaaattattaatcattactgggaagatgttcgtcattattataaagactttgacaacgcacttaactcgcctcaaacagaagtatatatccatgaaatgccaggtggtcaatataccaaccttcaacaacaagcaattgctgttggacttggcgatcgttgggatgaagtaaaagaaatgtacactgttgtaaaccaaatgtttggagacatcgttaaagttacaccatcttctaaagttgttggagacttggctctatttatggttcaaaacgaacttacagaagaagatgtctacgaaaaaggcgatactatcgacttcccagattccgttatcgaattctttatgggcgaaattggccaaccatatggcggtttcccagaaaaacttcaaaaattagtactcaaaggacgcacgccacttgcagatcgtccaggagctcttatggagccagttaactttgcagaggtcaaagctgaactaaaagagaaaatgggctatgaaccatctgaaaaagatgtcatttcctatatcttatatccaaaagtattcctagattatcaagagatgattagtaaatatggtgatgtaacagtccttgatacaccaacattttacaaaggtatgcgcttaggtgaaacgattgaagtagaacttgaaaaaggaaaaattctcctaatcaagcttaattcgatcggtgaaccaattgcggatggaacacgtgtcatttatttcgaactaaatggtcaaccacgtgaaatcaacatccaagatatgaatgttcaatcaacagttattgcccgccgtaaaattgatacaacaaacccagaacatgttggagctacaatgacaggttccgttattcaagttgttgtgaaaaaaggcgactctgtgaaaaaaggtgatccattattaatcacagaagcaatgaaaatggaaacaaccattcaagcgccattcgatggagaagttagcagcatttatgtttctgacggcgacactatcgaatctggtgatctattaattgaagtaaacagaaaataaaaaaacataaacgattaacgggtgggaatataacgctaatttaaagtagcaaactttaaatatcgatattttaaacgtagtaaacagacgttttttcgaatcaatagcgctatatttcgcacccgttttttctgaaaaaggagaacttacatatgaaatggtttaaaggaattgccgtagcattattacttgtgattttaactgcatgcgggaatactgaaacaaaagcgccaacagaaaaaacaaagaaaattgaagtgaaagatgcaacagagcaaaaaatcactttaaaagaagcaccaacaaaaattgtttcattaataccgagtaacactgaaattttatttgcgctcgatttgggagataaagtaaaaggtgtttcggcttacgatgactatcctaaagaagctcaaaaaatcgaaaaagtcacttcaactactgtagacactgaaaaaattatcgcacttaaaccagatttagtacttggtcatgagtctatgcttgccactgaaaaagacgcttatcaattactcaaagatgcaggaattaatgtgtttgtcgtgccagatgcaactaatttaaaagaagtcgaaaattccattgaaacaattggtaaattaactggaaaagagcaaaaagcaaaagacgtaactgcctcgatggagaaacaaaaagccgcagttgaaaagaaagtcaaagagctgaaaacatctccaaaagtgtggattgaaattagcccagacttatatacagcaggcaaaggaacgtttatgaatgaaatgcttgaacttgctggtggtacaaatatcgttaccgaaactggttttattccatacaatgaagaaaaagttgtagaattaaaaccggatattattttatccgtttatccagatgcaaaagcaactattttaaaacgcgctgcatggaaagaccttccagctgttaaaaatgaacagatttttgaaatggatgcgaataaattaagtcgtccaggtccaagattattagaaggtgcagcagatattcaagcagtttttgaaaactaattctttgataatgacagatgaagctttacaaaaaacgacttttaaggtaatttaacatagggtggattttttgctaaagcttattagtaaagtgattcacctaataaagaaagcaatttacacttagaagatcatgcataaacagcaagaatacggcaacttagacgacaaataatacaaacaaggtgtacttggttttaagtggaggagttgcctataagtaaatagtgagctgaatctggtttttaaaaccatattatttttcgggaagaagtgtttttgtgaaacaagttatggaagttattaaagaacaaattaaaaatttaccaatgatatttcgcattgcgcgctatgaagataaggctacatatcaaagtcattatctagggctagcttggcagattttaaacccattaatccaaattgctatttattatttcgtgtttggattcggtatgaatgcaaaatctggttctgatgcaagttatattgaatggatgctggctgggattattccttggttctttattagtgcggttattttacaaggtgcgaatagtatttataataaaataggtatggtttcaaaaatgaatttcccaatgagtattttaccgaatataacgattgtttctaatttaactagctactttacgatgatggtaattttgcttggattacttgccttaaatggaactcctgttacgatttattggggccaatatttgtattattttgtagcaatgattgcttttttatttagtgttacattatttaatgcaactattagtgttttagttagagattattatattatgttgcaatccgttatgcgtgtacttttctatgtaacggggattgtttggaatttagaaactatgttgccacaatggttagttcatttattaaaattaaatccaatatactatgtggttaatggttttagggaaacattcttaatgaatagaggtttttgggaatctccgtcctacacgatgtatttctggttgattacactaacactattatttgttggagcgacactgcacatgaaattccgtgaacgcttcgtggattatttataggaggttagacagatgggtaaaaatattaaaatagcatttaaacatgtgtcgaaagaatatgacctctatcaaaataaatcagacaagattaaaggcttgttcatgccgaaaagtcaaaaaatgcaatccttttgggctttacgagacgtttcttttgatattcatgatggtgaaacagttggtttaatcgggattaatggttccggtaagtcgactatttctagtattatgtcaggtgttatcccgccaacacaaggcgaagtcgttattaacggggaaacttcattaattgccattgcagtagggttaaaaggcccgttgacaggttatgagaacatccgcttaaaattacttatgcatggtatgaaaagttcccaaattaacaaactaatgcctagtattattgaatttgctgatattggcgatttcattaaccaaccaattaaaaactattcgagtggtatgcgttcacgtctaggttttgcaatttccgtgcatactaaccctgatattttggttattgatgaagctttatccgtaggggaccaaactttttatgaaaaatgtgttaataaaataaatgaatttaaagcacgtggaaaaactatcgtctttgtcagtcactcacttggacaagttaaaagtttgtgtgacagaatcatctggatgcatcacggcgaaatacgtgaaatgggcgaggcgaaagaagttgctcaaaaatatgatgaatttgtaaaatggtttaacaaacaaccaaatgactacaagaaaaaatatcaaaaagaacacaaagaacatcaaaaagctccacagaaaaaggtttatcctaatccaaatgctaacaagtatcgattaactctgtttgataaatttcttttaacagctttaattgttttaaccatattatttggaactttagtagcaactggtaaatctttcaaaggtttaattagcgaaacctcaactaaccaagtcgagcaaattgcatatgtagacaacaatgaaataacgatacgctaaaaagaaaaacatctctctattggagggatgtttttttatgaaaaagtaagctgaatttgtctaaaattttaacaaaaatatatttaaaactactttcttttattttgtaatgtatctgtaacttacgatggcttaaagtttggtaaaatataggacagtaaacaaattaaggagtggttggagaataatgataaataaaaagtggatgaaaattgtaatgattccaatgctagttgtcccaatgtacggtttgacaactgtcagtggacaattacagaattcattaactggagaaaattcctttgttaaagacgctcaagctgcaacaacagcatcgcaacaagcgtttatagacaaaatagcacctgctgcccaggcatctcaagaaaaatatcatctgttgtctagtataactttagctcaagcaattttagaatccggttgggggaaaagtggacttgctacacaaggatataatttatttggtattaaaggaaagtacaatggacaatcagttatcatgtcaacctctgaatatgtgaatggtgagtggattaagattgatgctgagttccgtaaatatcctagttggaacgaatctgtaactgatcatacacttttattagtgaatggaacttcttggaataaaaacttatacaaaaaagtagttgatgcaacagactataaagtagctgctaatgagctacaaaaagctggatatgcaacatctccaacttatgctgctagtttaatccgagtaattgaaacttatgatttagcaaaatatgatgttttatacgacaaaattcttactcaaaaatccacttccggtaaagcgactgtaacaagtccaacagggaatggtgtttggactctaccttataaagttaaaggtgtacaatctgttagtccagctagcacatacgctaacaaagatattgatttagtatctgttgctacaactaaaagaggtacgtactatcaatttaaatataatggtaaagtaattggttgggtagatggaaaagcactgaccatatacgatagcgtcaattatgataaagtaaacgttggacgagctaagattacgagcgcacctggcaatggtatttggtctaaaccatacaatgtatatggacgagaatttgtaaccaatgcaactacttatgcccaacaagaaataaaactcttacgtgaagcgcaaaccgcaaaaggaacttattaccagtttagtattaacaataaaacaattggttggattgataaacgtgctttgactatctatccatatgattctgttatttctagcaaagctgttaaccttgatggacaaattactaacccaacaggaaacggtatttggacaaaagcatataaattagaaggcacaacttctgtcgcccaggctactcaatatgctaaccaagatgttaaaattagtgaagttgttgaaactcaacatggtacttattacaatattagtatcggcggaagagcaatcggttggttagataaaaatgcgattactctatatgaccaagctgagtacaataaagctgttacactagacggaactatcaaaaacgtacaaggtaatgctatttggacagaaccttatcggactgctggcacaaaattagtcgctcaagctgaaaaatatgccaacaaagatgttcaaattgtccgtgaggcgaaaacaccaagaggaacttactaccaatttaaatcaggtggaaatgtgattggctggttagatgtaaaagcttttgatatgtatgatgaaataacttcgaacaaagctgtaaatatggaagcagttattgaaaatgtcgagggaaatgctgtttggactgcaccttataagagtgtaggtgtaaaactgattggtccagcaagtaattataaagataaaactgtcaaaataactcgtgaagctcaaacaagtagaggaacatattatgaatttagctctaatggtaaaactgtaggctggttagataagaaagcatttaaaacttatagtactatagaatatgatgaatcttatgtacgtgatgcagttgtaacgaatgttagtggtcatactgtttggacattgccatatcaagtttatggtgtgaaatcagttgggtcagcatcaaactacaacaataaacaagctaaaattacaagacgtgctaaaacagatcgaggcatttattaccaattcagcattgatggtaaaaatgtaggttggttggatgaaagagcttttgatgtctatgatacggtagaatacaataatgtaattaataaaactgcattattgagcaacccaacaggaaacggtatatggtcagcaccttatagagttatcggtgttaagaatgtaggacaagctacctcatatgctaataaaaccgtgcaattagttcgagaagcgaagacaactcgagcaacttactctcaaatgagcgtagatggtaaactaattggttggattgaccaaagagcatttacgaatattagataattgaacgttaaataaaaaaacagagtgattttaatcactctgtttttttcgcttacgatttagttatataaataagctctttcaaaaagtctttgtaataagctgattcaaaatgggaaaacgaatgaccaaatggatagttgaaatcaccaatatatgatttctttgaaaaatcgatgacttttgcttcaggcagtttcgacaagaagtagttgtttattctatcccagaagtaattatttttctcaattgccattttatttttataaactactacttttccattttcatcgtaatatgaggttgtaaagccacctaagtttaaaatcactcgatcagcagggaatgtttctgttaattttgcaataaattgatcagcataacctttccactcattaaagaatgcttcattatcaatatgatctagaattctttcataaggaaggtcattaagtaattgactatcttctataatatatgataaagtgattgccgttttgttatttaaccaaatgactggacgaataacatcaggataaagatcaataaggaaataatcagaattagactcttttaggttaacgaaaaagtctttcttccaatcttcttccacgattgttttctctgctggtttcatatcattgtacttgtccaaattaaaactctcagcaggttcagtcattacactaataatagaagagtgaaactgcgtaaagctacattcgaaaaatgctttataatcaggattgaaaaaaggagatgagttaaaagcattgcgactaaaacaagtgcccataacagcaattttagttatatcttctttaatttttggcgcgggagccgttaagcatgacaaattattgaaatcatttttagttaattgtgctaggaatttcttgttggcaatattaaaaaacttagtattactaaggtcaattgtatttggaactagaataggtaaatcaggcatatctttggaacggaggaaaaaatcccatgtcgcatatgctttgttattagggccagctaagaattcacttttactaatgcgtacagagtgtttccctattcctttttttagtggccaagcttgttccatatgatattcaaatacatctgcttttttatctagtcgttttgctacaacttgtccttcatggaagtttccttctaatttaaattgtaaagttatatcgctacctgattcttttagttgactgacacttactaatccttgaatattctttttgaaatagaaggataatctgcttgagccagtgacataagagcgcagtgtagcaaagtgcggggaagccaattccacttctttcggaatggatggttttctttcggcgtcaatagataggaatgtagttaatccttgctctacttctttaggcgatatttcaatcatggcatctaaaatatttgtattatctactaagaagttagttgctaagtctttaacaggaatcgaaaagctaacgactttatctgtaaccagtcctaagtcaaatgattgttcttgctcatggaataaataaaagctaggtgttggtctacgttttagtagtagctttgctttaaacggtccatctggaagcgaagaattaattttgatagtacctgtcatcaatttttcgcttaatgaaaaactttctaatgaagctaaaagttccactggtctactaataagcgttaatacaccttctggaaaatcaaaatgatattggtaaagtgaattagatggttggaaaggttgattaataataggtccatctgacatcaaatgattatatggataatcgccattcactttaaatttccaagcagtctcattatttgggagagaatactcagcaagttcgtcaatcgaaataactgcagtgaatgaatttttttcttgagtaaaaggaatgtttaacttttgttcagggtgtttatattctcggatttcgttgtaatatgcttgaatgctactgatttttccttctgaaaaaccatgtatcttccatgttttagattctattaactcaatttcctttatataaaatttcatcgctagctccttaaaatttaattatgatactttttattttatcatatttcaataaaattccctacaaaattgataaaagttgaaagttttcagaataattgcagataatgaaaagcctttttttattaagtgaagctaaacactgataaattttgcacagatggttgataaactgctgtaaataagatatgctgtagatactgaattttatacaatagcatatcagtaaggggttgtagtgagagtggaaaaaccatttttaaccgttgtggtgccttgttataatgaagaagaggtattaagcgagagcgtaacacaactaacaaatattataaaaaaattagtgatgaatgattctattagtaacaatagtcaaatcatgtttgttgatgatggaagtaaggatcgaacttgggaacttataaagcaatattctgaatcacatgagcatgtatcagggctaaagttgagtcgtaattatgggcatcaaggtgcattattagcaggattaacagctgcacatgaacattcagactgtgttgtttctatcgacgcagatttacaagatgacgtaaatgcaattattgaatttatggaaaaatatcatgaaggtttcgatgtggtttatggtgtgagagataaacgcgatacagatacttttttcaaaagaaattctgctctaactttttataagattatgagtaagttaggtgttaatatggttcctaatcatgaggactatagattacttagcaaacgcgcattaacagaatttttacgctataaagaagaaaatatgtttattagaggtattgtaccattacttggatttaaatctaccaaagtttattataatagaaatgaacgctttgctggagaatcgaaatatccattaaagaaaatgttattatttgctgttgatggtattacttcttttagtgtggcgccaattcgcttattgctagtgattggttctattactttcttagtaggtgtagttttaggtatttatgcaattgttcaaaaaataatcgggggcgtagttcctggttggacctctttaattgtttctatttggttactcggcggggtacaattaattggtatgggcgttttgggcgaatatattggaaaaattttccgacaagtaaaagaacgtcctcgttttacaattgaagataatgtctttgaaatgaaatgcgagaaaaataaaaacaacgagagtttggtgtaagtaaagtgaagaataagttagtttacacttttaatgctttatttatcctcctatttggctacttgctttgcctaagcattttcaaaccacaaacttttacttttgaacatccttttgtcttaatagttcttagcgctgctgcgttattagttcttattgggattttccagtttagtactagattaaataaaaaaggagatggttttttaaccatctctttagtgattttgatattagcagtccaagtatatctattagtttcgctgcaaatgaattcatatgcggatgcctatgtaattaagggcgagtctttaaaaatgctggcaaatggaggacatgctactggtcaagaatactttatgatgtatccaaataatatctttataaccattatacgatactggttatatgcttttggaggaatgcttggagtttccaatgtattcttacttgaaagtgtatttctatttttatgtatgaatattactatttttgtattgttttggattattcgtaaagaaaatggtagcaaatatgcgaatatttatcttatcattatactattttgtgttccattactaggttacatttggtatttttatactgatactctagtcttgccttttgcttcccttattactttattttattatttatatacgaaaaataataaatggtggtattttattattatcgggttattgtttgccgttgggtatcatattaagccaaatatcataattttattgccagcgatgattattcatcaatgtttcataagaaattggcgtaaggtcttgctaaatacaatggtgttagcgattttctttgtaagtttaaatgctgttttcacgccattatctaatcattatggatttaagaaaaatttggctatagaatttccgcaaacgcactgggtgatgatggggcttggtgagccagcaggtcgttacaatagtgaagacgtggcttttacaaatcaatacaagacaaaagaagagaaacaagaagcgaatatagagaaaataaaagaacgactaaaagagcatgggcccattggacttgcaaaattatataataataaaatgataaacacatggacagatggtacacgcgcttatacgtggtacacgaattctgcattagattatccagcttcatttgattatttctttggagataagcgcttttttacagagttcgctgcccaaatgttccatatcattaatttactgttaatatgtttaggtgcgttacgtttttataaaaaaagagaacttgatatatctttctttataaatatcaccttagttggtgtctggttatttcatttaatctgggaagcaaatcagcgttatatattatttgtaactccattaatgattgtgtcttctatttatggatttaagtttattatagaaagtttatttacagaaaaagtagttttaaaagataagttaaaaaaatctttcttaattacgagtttccttatctttttgttaagtagtgtttttcttgcgtttggtggaaaaatgattgcgactgataaacaagatattaatcattatattgttaagcaaagttatgctcatatagcgttaccagttaataataaacaaactatttcacaagaatttacatctgatagtccttttaactcaattgacatatatgtgatgaaaaaaccggaagctagtagttcatatcgaataaaagttatcaatgaaactaatgacactataatttataatcaagagaaaaaaggtacagattttccaaatgaggcttaccttaaattgagcgttaacgataatcctaaaggaaataataggtatcgcatcgtaatctcagaagtagaaaatagccatccaaatcaacctttagttttaggaacctattttgataatgatttagacctttacccatatggcgatttgtacgttaatgatgacaaaaaagaataccaagacataggcttttttgttacaaatacaacctcaaaaccattaatgccaaaatatgcatatattatgtttgatttatgtatcatgcttgtttttgcaggaacgtattatgtttttaaaagaagacgttaatactatccaatattaggttatgtatataaacatggagaacatctaattaacatgtgacatatattttgaattagggagagtctataaatgagtaaagattcaaataaaataattgaacaaagccgagaaataggaataagcataattatgccactttataatgtggaagaagtaatacttgaaactctcgaaagtattcatgagcaaacttttgatagttatgaagtgttattaattgacgatggttcaacagataaaacaatagaaattgtaaccgaatatataaaagataagccacggtttaaattatacactcaaccaaacggaggaccagcttctgcaaggaaccatggtttacgacttgcaataggtatgtatatttgttttgttgatagtgatgatatactgcctaactattccttacaactaatgtatgatggtgctatttctacaggggcaaaactaattactggagcaaccaaacgttttaattcagagggcgaatggtttataccaatgcatattcaatataatattgctaaaccaggaatgaaaaccttattaaaaaatcctgagttgttttattcaattggaccatgtgcgaaattgtatcaccattcactaattgatggcgtatttttcccagagaatattcgctacggggaagatcaaccgtttgttttacatgctttattgcaagccaaagatatttatacagtagaaaaagttgtttattattatcgtttacgcgatggtgaatcgcaatcattaacgcaatcagtagataaagatccaattcgtattttaaagtctgttttccagatttttgactatggtgaagaagaactgaaaaaaaacaacactgattacgaggttgctttaaaatattatcaacgcgtttctagtgtggagctttggggagcgttacgagcagcaatagaaagcaaaaaaagtgagaaccaaaaaattgcttttacaatgactttagactggttgaaaacaaaatcagatgactttttaaatattatcccttcatttagatacttcttgttatttagtagtattgagcgtgtacgttatataacgaaagacaataaagaaaactatcgtaatttaattggttatttatggagccgacaaggggaagaagctaaaattgcatttagaaaaacttacccaattcccatgaaggctgctctacaaataattgaaaataataattggcgtgatgctcgtaaaatttcatttaaatttattgttcgacgcaagtttaaagctccaattttaattcgtaaaataagtagagggattatttttagaattgctacattaatgccacggaagaagaaccaagtgatattagctacagaacgtagcaccactttggaaggtaatttattagcaatttatgattatatgttttataacaatatgcctcaaaaagtatatgtgtttttacgaaaaaatcggaattggtttgaaatgtttcagctatattatacgctggggcgaacgaaaacaattgttttagatgattattacaataaaatttacggtttgaaatttaacaaaaatacacatgttgtgcagtcatggcatgcaacaggcgcatttaagaaatttggatttagtgcgctggaaggtacagatgcaaatacagaagaatttgaaactcgtgcgcattccccttatactgatgtgcttgtaagctcagaaggaattattccggaatatatggaagcttttagaaaacaagctaatcaaattaaaccaattggtgtacctcgaactgatgtgttttttgatgatgaatatgtgaattatacaaaagaaaaatatatgaaaatgtatccgcaattgcgcgataaaaaaatattgttatatgcacctactttccgtggtggaccgaatgagcgttttaattatagtgtagttcttgatattgcagcgttgaaaaaagaacttggcgatactcatatcttaattttgaaattccatccggttattaaaaacgtttcattcaatgtagaagaagatgatccgtttattttgaatttaacgctaaataatgatattaatgacttaatgttattcagtgatgcgcttattactgattattcttctgtcattttcgaatttagtttgatgaacaaaccgatttatttctttgcctacgatattgatgattatcttgatgaacgtggtttctactttgattataaagcgaccattcctggtgaagtgtttagagatacaccatcgcttattgaagcggttaaaagtggtctatataattacgacgagttggaaatctttaaaaagaaatttgttggtagtttggatgggaattcaacgaaacgttttgttgagacttatattggaaaagcaaatgagaaagtgaaggatatatgagtatagtaatagaacaactcgttgtaaaggaatctagtggtaaatggggaagtcctcatcttttagaacaaataaaaaataatatttctatgtcaaacgctgattttttaattatttgttcaaaacctgaagaaaacatcctttcacaaattcaagactatattgctcgcttccccgaaaacatggttggagcagatattcatttatttagtcaaaatcctgtatttttacaacatcttcgtaaattaccaaatgaagatagttacgaaatgactgacacacttcaattcttagttgaattaacaccaaagccaactagtacgtatttagaacgtgatcctcatatgctcctagaagaaatgggacaataccaattatataatgtatcctttttgaaaaattattttgaggagaggataaacgaaacaactttgattgatatttttcatcaggcaaaaatggtttggaagcacagtgttttagaagaaacaaaaataaacgaggctaaaaatcaagttgcaaataattatagaataacagatatggttgattgctgggaattttatcgaaagttagaaaataactacacaagtttaagactggaacttcttgattttgataagaacttgtttaattatttgattcgtactaaattaggtccaactttccaaaagcaattaatgtctggaaatcttaccgaggcaaccgaggcaattgaggcccttactgtttttctagaagataatgataagcatcttgtaagtgaacttgtttccttaggatatttctatctacaagtaccagtgaaagaatatcctgagtggggtaataataaagcgtttagtaatgcgtatttaaaattcttaaatgtactttttgaaaaaatgcattatcaaacaaagcaatataatttaagattttatcgacgcgctacaaacgctgtctataaagcagttggtttaaattctttaaaaccgattgctaagtgttacaaactttatttttaagttgatgcaaaaagagagctgacaaatgaaaaaatgtcagctctctttttttattttttatcgtttttatgcacttgttgatataaatcatcaattaatgctttgacatcctctttgatttctggatgttttagcgcgaattgcattgtagtttgaataaaaccgaatttatcgccaacgtcaaaacgttcgccttcaaagtcataagcaaatacgcgttgtacttcatttaggctattgattgcgtctgttaattggatttcgccgcctgcaccaggcttttgggtttctaagaagtcaaaaatttgtggtgttagtaggtaacgaccgagaattgctaaatcggatggtgctttggcaggatctggtttctcaacaaaaccttttacattgtataaattcttatcgtattcattaattggatcaataataccgtaacgatatgtttcctcatgtggcacagtttgtacgccaattacagaactatgtgttttttcgtattgattcatcaattgtttggaacaagggattttggattctacaatatcatcacctaacataacgataaatggctcattcccaacaaaaccttttgcttgaaggatggcatcaccaagtccttttggttttgcttgacggataaagtgcaagttaatgttagttgtttgctctacaagatgtaataactctaatttgtttttttcacgcaaattattctcaagttcaggcacggaatcgaaatggtcttcgatagcgcgttttcctttaccagttacgattaagatatcctctatacccgaggcaacagcctcttccactatgtattgaatagttggtttatccacgataggtaaaatttctttaggcattgctttagttgctggtagaaagcgtgttcctaatccagcagctgggattacagctttttttactctcatatttaataatctccttctaatctataattcaagtagactcacctaattatacgctaagcttctttgaatttacaagtttttatcggcaaaggagataaatttcaaaagttttgttaaaatgatattgaaaatagatattcgcttagatagaagctagtttgttagacaagttttgtgttataatataacaggttaatataaaaaacagttaaaggagattagaggatgatatacgctcaaattttagctggaggaaaaggtacgcgaatgggtaacgttagcatgccgaaacaatttctacctctaaatggtaaaccaatcattgttcatacagtagaaaaatttattttaaatacacgatttgataaaattcttatttcttcacctaaagaatggatgaatcatgctgaagataatattaaaaaatatatttctgatgatcgaattgtcgtaattgaaggcggggaagaccgtaatgaaacaattatgaatggaattcgttatgtcgaaaaaacatttggtttaaacgatgaagatattatcgtaacacatgatgctgtgcgcccatttttaacgcaccgaattattgaagaaaacattgatgctgcgattgaaacaggcgctgtagatactgttattgaagcacttgatacaatcgttgaatcaagtaatcatgaatttattacagatattcctgtcagagatcaaatgtatcaagggcaaacaccacaaagtttcaatatgaaaaaagtatataatcattatcaaaacttaagcgcagagaaaaaacaaattttaacagacgcatgtaaaatttgtttgcttgctggcgatcaggtgaagcttgttaaaggcgagatattcaatataaaaattacaactccatatgatttgaaagtagcgaatgcgattattcaggagcggatagccaatgattaatcaagtatatagacttgtgtcagagagacagtttgaagttgccaatgtggacgaatctttagctggtgatgtggtcgttgttagacctactcatttatctatttgtgcggcagaccaacgctactatacagggtctagaggaaaagaaatgctttctaaaaaacttccaatggcgcttattcatgaaggcgttggcgaagtcgtttatgacgcaacaaaagagtttaaacctggaacaaaagttgtcatgattccgaacacaccatttgagaatgatccagtcattgctgagaactatttgcgttcgagtaaatttcgttctagtggttatgatggtttaatgcaagattatgtttttatgcgtcgtgaccgggttgttgcgttacctgatgacatcaatatgaaagtagcggcattttctgagcttatttctgttgctgtacatgcgattttacgttttgaaggaaaaagtaacgctaaccgtgatagctttggcgtatggggtgatggaaacttaggctttatcacttccttattattaaaaaattggtatccagaaagtaaagtttacatttttggaaaaacaccatataaattagacttcttttcttttgtagatggcgcatattcgattgatgatgtgccagctgatttagtcattgatcaagcttttgaatgtgctggaggaatgggtagtcagtatgcagtcagtcagattattgatgtaattaaacctgaaggaactatttcgttactaggagtttctgagtatccgattgaatttaactcacgtatggtactcgaaaaaggacttacagtttacggaagtagtcgtagcggccgggttgactttgaaaaaacagtagaatttctatccacgaacaaacgcggggtagaatatttacaaaacctagttggtgaagtgcatacggtgcattcaattcaagatgtaattgaagcctttgaagctgatttacgtagtccatggggcaaaagcgttatggagtggaagatataataaaacatgggggagtttaggctatacgcttatgaatttgtttgctaaagtatatttaggaagcaaggcagtcgagaggaaattcggcgttcatatgcgagaccttaacttcccagttttatatggagagggaaaaaagaatgaaatttgcgattataattcctttttacaatgcggaaaaaaggttggctttatcgatagatagtataattaagcagacttacagctttttgaagcatgtggaagttctgcttattaatgatgggagcacggaccgtagtagtgcgattgctcatagctatgccgaaaaatatccgagtaatattcgcgtttttgatgtcccgaatggtggtccttctaaggcgagaaatattggaatacataatgtacaagaagacactgactttgtaggatttttagatgcagatgatctgttatcgccaaatatgctttttagtatggtgaacttcctagaaaaatcagctgttaatatgcttgtcccagctttttattatttagatgattttggaaaaaaacaaaaaatttctccacataaattaaatgaccgtttcacaaatggaaatcgagttgtagcgattgaaaaagaaccgcaagcaattcatttttatattggcggtactttttttcgtttcgaaagtttgaagcaatttgtctttgatgaaacgcttaactttgcggaagatcagcttttaattacgaaatttttgcttgaaaatagaagttacggattgattgccgatgctggttactattactatcgtgatttaaagcaaaaaggttctttagtaagttcagcttggaagcaaccggaaagatatacgccatttttacaaaaggtgtaccaaacttatttaacaaactctaaagaaatttttggcgaagtgattccatatgtgcagtatttaatcgcgtaccatgccaagttgtttttttataaagaaaacatttattttaaagaagtattaaatgagcaggaacaagaaatctttgtgcgtgaattacagaaaatattacaagaagttggtccggagatgattgtagctctggatacaccgcttgttgtaaaagaaatgatgctctctattttgcgaaacggctggccagtacagtttaagacggcagaattagaagaagttccgcttgtcacagtaaaagaaaattaccgtcctggaaaagctgtaacagtggaactcttactagaagaggcgcgggaaactttatcagatggcggagaattctttgctagtacatctgtaggtacggcgcaaacaaaagtggtaaaacgaaaaacagcccaaacaatttgggatattgttgttcgtgaagagggtacacttgaaaaagtggtgacacggttaaaaccatatcaattgaaagtccaagtgttttaccaagacaaaaatcaaaaaataacaatgacagatttaaatgtcatcaagagtgtgttaggaaaattaaaaagaaataaagctttaaagcgaaagtttaaacaggggggagtatcctgatgaagtttgtacaaaaaatatattatttcctatttaagctagtaggatttttacctcgaagaaaagaattagtgatgtttgaaagcttttctgggaagcaatatagttgtaatccacgtgctatttttgaatatatggaagagcataatccagaatacgagttgttgtggagtgtaaatccgaagtatgttgatttgtttgaagcgcacggggtaccgtatgttaagcgtttttctgttaattggttgtttaaaatgggcttagctaaattttggatttctaatagtagactgccgcttgagctaccaaaaccgaaaaaaactatttatgtacaaacgtggcacggaacgcctttgaaaaaactaggtgtcgacatcgatgaagtacatatgcctggccaaacaaccgaacaatacaaggctgattttgtgaaagaggcgcagaagtgggattatttaatttcacctaatgcgtattctagtacgattttcagacgtgcatttggtttcactggggaaatgattgagtctggctatccgagaaatgatattttatttagtgcggataaagagttgaaaatcgctaatatcaaaatggccttaaatattccagaagataagaaagttattttatatgcgccaacttggcgtgataatgatttttacgaaatcggaaaatataagtttgatttaaagattgatattgccaaaatgcaagaaaaatttggcgatgaagtcgttctgttagttcggatgcattatctcgtagcagaacattttgatttcacgcagtatggcgattttgtacgagatgcttcaaaacacgaagatattagagatttgtatttagtgagcgatttattaattaccgattattcttccgtattttttgattatgctaatttaaaaagaccaatgttgttctatacgtatgatttggctgaatatcgcgatacacttagaggcttttactttgattttgaacaaaatgccccaggaccacttgttgaaatgaatgatgctttaatggcagaaatagaaatcatgcttgaaaatcctcctcaaattgcagaaagctttttagaacaattctgtacttgggaagacgggcacgcagcagagaaaacagtgaaaaaagtttttgctgaaaaataggcggtgggaatattgaaaaaaatagcaatttatatgtatatgcttgctgttaaaataattggattcttggcgagccttttaccagttcagcaaaaagttgtttttcttataagttttgaagaaaatcccactgcgattattaagcaaatgaaactgtccaatgtcaccccgaaaacaattgtcttctatgatcctagagtagacgtatcaaagttatctttagactttataaaagtaaaaccgaagacactgcaacaatttattccattaatgtttcacctcaatacggcaaaagtagttgtcacagataattattttgtggaattagctggcttgaaattacgaaatggcgtaaattgtatccaagtttggcacgcaaacggtgcgcttaagaaatttggctgggaagataaagcagcgcaaaaaaggtcagatcgggataagaaaagatttcaagaagtatataaacgttttacaaaagtacttgttggttctgatgaaatggcatcaattttcaaaaaatcatttttactagatgaatcgaacatgttgaaacttggtgttccacggactgattatttcttcaaagaagcgcagttacaagaaaattatcagtggtcatacgagcatttacatttaacaaacagaataaaattactatatgcgccgacttttcgggataatgagttgggaatggcaaagttacatttagatattgcggaaatgaaacaagccttaggaaatgaatatcaattgattttaaaattacatccttctattagtaatgatttagagaaactagatgatgattttgtcatttatgtggataaagaaacgccgattgaaacgttactaccagttgtggatattttgattactgattattcttccattccgtttgagtttgctttacttcaaaaaccaatgattttctttacgtatgatttaacggaatataataatgctagaggactttcagatggctttttagaaaccattcccggtccgcatgtttttacaacgactgagctaattgaagtaatacaaaataatacgtttgatttggaaaaagttcggttatttgctgagaaatggaataaatattcggatggattttcaagtgagcgttttgtatcctttttaaaagaacagcttgaaaagtagcactgctaacaagtagagaaatttttgttttcttgatatactactaaagaaagtaggtgggctgatgaagaaagtaattacatatggcacatttgatttaattcactgggggcatattcgtttattagaacgagcaaaagctttaggtgattaccttattgtagccatttcaaccgatgaatttaatcgaatcaaacacaaagaagcataccataactttgaacatcgcaaattaattttagaggcaatcagatatgtcgatgaagtgattccagaaagtaactgggaacaaaaattagaagatgttaaaaatcgtgatattgatatttttgtgatgggtgatgattgggaaggcgaatttgacttcttaaaaccttattgtgaagttgtttatttaccacggacagacggtatttctacttccaagattaaagatgatttaaaatagtcgtagcacaaaacaggcagaccggtaatgttcaattattaggtggtaggcttgttttgtgctattattatgtataaataataacgcaaagaactagttatgataggagcagaagaaatgacaaatttatttcaagatgatagtctaacgctgcatacagacttatatcaactaaatatgatgaaagcgtattttgacgatggacttcatgagcgtagatcggtatttgaagtgtttttccgagacatgccatttgattcaggttttgttgtatttgctggactggaacgaattattaattatatgcaaaatttacgttttacagaaacggatattgcttatttacatgatgaacttgggtttgacggacctttcctcgaatatctacgtaattttaaatttaaaggaaatattcttgctgcaaaagaaggggaattcgtgtttaaaaccgagccaatccttcaagtagaagcaagcttggcagaagcacaattaatcgaaacagctttgcttaatattgtgaatttccaaacgctaatcgctacaaaagctgcgcgaattcgttctgttattgacgacgaaacgtttgctgaattcggaacaagacgcgcgcaagaaatggatgcagctatttggggcacacgagcggcttacatcggcggttgtgattccacaagtaatgttcgagctggaaagattttcggtattcctgtgtctggtacgatggcacatgcgatggttcaagcctaccgcgacgaactagaagcatttagaagttacgcaaaaacgcattttgattcgattttcttagtagatacatacgatacgctaaaatccggcgtaccaaatgcgattaaagtagcgaaagaaatgggcgataaaatcaactttatcggcatccgcctagatagtggcgatatggctttcctatctaaaaaagcgcgccaaatgttggatgaggctggttttacagaagcgaaaatttttgcttcaagtgacttagacgaacatactattttatccttaaaagcgcaaaaagcgaaaattgattcttggggtgtgggtacgaaacttatcacggcctacgatcaaccagcgctgggagcagtttacaaaatggcggcgattgctgatgaaaatgatattttacaagattcgattaaactttctagtaacaccgaaaaagtttcaacacctggtaagaagaaagtttaccggattattacgaatgaagatggtttaaaagcagaaggtgattatattgctttagcggatgaatcacttgaaaatgtcgacaaactaacgatgttccacccagttcatacgtatattatgaagaccgtcgagaatttcactgctcgcgagttacttgtaccgatttttaaagatggggaacttgtttatgacatgccgactttagatgaaattaaagcatataaagaagaaaacttggcgctgctttgggatgagtataaacgaactgttcgtccagagcaatacccagttgatttaagtgtaaaatgttggaaaaacaagatgcgtaatatcgaaaaggtacgtaaaagtgtccaacttcattcaccagttgaactagatatgccgttttaggaggaattataatggaaatcagagaaagaattttagcagatatgcaagtggcagaaacaattgatgcacacgaagaaatccggaaaagtgtcgagtttttaaaagcatatttaaaaaagaatacgttcttaaaaagctttgttctggggatttctgggggacaagattcgactttaactggaaaactagcacagatggcgataagcgaattacgagcggaaacaggtgatgatgagtaccaattcttcgctgtgagcttgccatacggaacacaactagatgaatcggaccgtcaagatgcacttgattttatggcaccagataatcgcttaaccgtgaatattaaagcttcggttgatgcgagtgttgcggcgcttgcggaagcgggagttgaactatctgatttcgctaaaggtaatgaaaaagcgcgcgaacggatgaaagttcaatacgcgattgcagcgatgcacaaaggcgtcgttgttggaaccgatcactccgcggaagcagttactggcttttatacgaaatacggcgacgggggaacggatattaatccactgttccgcttgaataaaagacaaggcaaggcgcttcttaaagagcttggctgcccagaacatttatatttgaaaaaaccgactgcggatttagaagataataagccagcacttcctgatgaagtcgcgcttggtgtaacttatgaccaaattgacgattacttagaaggcaaagaagttccagcagatgctgcggcaaaaattgagaattggtttattaaaaccgaacataaacgccatatggcaattactatatttgacgatttctggaaataggaggctgtttaaatgaaagttggttatggtttattaactgcattttatacacatccaggagaaaaagataatttagttaaaattttgcttgaagcggctgaaggattggatgattacaacacgtgtattcagtatattgtcagcgaatctgaaaccgagccagacacggtgtttgtttctgaaatttgggttgacaaagggcaccataaagcatctcttgataacccagctgtacaagaaacaattaaacgcgccaaacctttaataaaagatataaaacaaatacaagaattagacatactcggtggaaaaggcatatagatgataaaacatgaatgattctaggactctcctggaatcatttttttggagggatgacaaatgcaaacgttgatgattgtttgtgctggcggtgcgacgtcaagcttaatggcacaaaatgtcgtgaaaagcgcgacatcagaaggaatggacgctgttttactatttccagatgacgtaaaatacaaagatagttttctcgagaaatatagcgagcgggatctgattgtcgtgatgggtccagtcggcgcaattacagccgggaaattccgtgattacaaagagcaagtcgatgccgttttagtagcaccacaagtgaaatatatgtacaaaacagtggaggaagtattaggcgaactaaatattccttgcgctaatattgattcactcgatttcggtcggatgcgcggagataagattctcacgcaaggtctagccttaatggatgcgaaaaattccaaataaggtgttgcaactttagaggggaaacgttaaaatgaaagaagatgaaaaggacaagtgatttgtccttttcttatattattgtgaagtaaccgcgattttgcggtttcattttatagataagggtggttttgtttaaaattatgaaagactttaccgagcaagagaaaattatcgttctagattttggtagtcagtacaatcaactaattacgcgccgcattcgtgaattcggtgtgtatagtgaattacatccgcatactattacagttgaagaaatgaaagcactaaatccaacggggattattttttcaggaggacctaacagtgtgtatgacgaagatgccttccgcgcagacgaaagaatctttgacatgggaattccgattttaggaatttgttacggcatgcaattaatgacaacgcacttcggtggcaaagtagaacgtgcgaaagaccgcgaatacgggaaagcggacattcacgttgaaaacccaagccgtttatttgctggactaccaaccgatcaagttgtttggatgagtcatggcgatttagttgtcgaggaaccagctggatttgaagtaacagctactagtaagtcttgcccaattgcaggtattgcggacgaagatcgtttgctttacggcgtgcaattccacccagaagtacgtcactcagcttacggcaacgaattactgaagaattttgcattaaacatttgtggctgtaaaggcgactggacaatggaaaactttagtgaagtagaaatcgctaaaatccaagaaatcgtaggcgacaaaaaagtcttgcttgcactttctggcggcgtagattcctctgttgttggtgtgttaattcataaagcaattggcgaccaattaacatgtattttcgttgaccacggacttcttcgcaaaggggaagctgaccaagtaatggcaacattacaaggcgaattcaacatgaacatcatcaaagtagatgcgaaaaaacgcttcatggacaaacttgctggcgtttccgatccagaacaaaaacgtaaaatcatcggtaacgaattcatttacgtattcgacgacgaagccaacaaactagacggcgtagaattccttgcacaaggaacactttacacagacatcatcgaaagtggtacagcaactgcccaaacaatcaagtctcaccacaacgttggcggcttaccagaagatatgcaatttaaactaatcgaaccattaaatacacttttcaaagatgaagttcgcgcactaggaacagaacttggcatgcctgacgcaatcgtttggcgccaaccattcccaggcccaggcttaggaatccgcgttcttggcgaaattacggaagagaaattagagattgttcgcgattctgattacatcttgcgcgaagaaatcaaaaacgcaggcctagaacgcgaaatctggcaatactttactgctcttccaaatatccgtagcgttggtgttatgggtgatggtagaacgtatgaccatactgtggttgttcgtgcagtgacgagtattgatggtatgacagccgattgggcacgtattccgtgggatgtactggagaaaatttcggtacggattgtgaatgaagtggatcatgtgaatcgtgttgtttatgatattacgagtaagccaccagctacggttgagtgggaataattaaagaaaccgtgaaactattgatatcagagggtttcacggttattttttgttttatgcaaccattttgcaaccaatagttcaaaaattgaccagttatttaattctattgaatgattataataattaagtaggaggtaatctatgtgagaaaaaaattaattgaacagattttaatatcaccttcacctttttctattttcgaagaaaactataatgaattgagaaatactagatttttattatttgataacaactcaaataattttggaaaaaaatttcaaaaaatggaatttaataactttacaatttctccattagcagagtatcacaatacaatggttcttgatcaatatactgtaaaagaatcaagggaattagaagtagttcattgtgtagattttgattcaaacattattagtaacttaagaaaactttttttccatactaattacagtaacgaatacttaataaaattacttttatatgtgaaaaaagaacgtatacagcctaattgttcgccctatttaatagaatgtgccgcaaataattttaatttggataaacaagatatttatgaaagtttattatccttctcactattggaaaatacgaatattgaacaattgataactaaccatctaaataaagaaccctcatcaacagattatttagacacagatgaaagatggcgatctttaattgaactaaaaaaatatgcaactaaagaatatatcccaagatactattatatctattgtttattattgaagatgtattttcttaagttctcttctaaaaaatctgcaaaaaacaaactcattcaattattagatagtattaatacagaactatttagttattgggaaaatgaacttgtaatttgctacttatcattaaaagaagactctaaaactgattcgttttttggttctgtaaagcccaatacaaaagatatgttaataaaaatccaaggaatggcttgggatttatttcatttgcgatgtgctcatgaacatatggcagagcgtaataattattcaaaacgtatttttttacattcatttagctcagaggataaaggattaaactcaattattagattaaatccaataaaaagaattgcattcgatggtaaggatgtttatactcaccatagatataccatatttaatatgtgtcctgaagtagatgtatatacgattctaaatgaatacacacatcatagaaacaaaatgtgcaaagaaacaaattaccaagaactatccaaaaaattagagtttgaactcctacatctatcatcacgatagttcgcatagaaggtaaagctatcttctatgcaatttaattttctattaattaatctactttgaaatcgatactttctcctcatttttaagcttttcaattttttctctaacttacttacatctctaaaataactttcatttatgggcccctcttacgcagtttttatgaattccccatatgttactgaaaaaggtttaagatttattgattcaatgaagccgcttaggatgaacaaaaaaaatcaaatggaacaaaagagagtatttttagagcgagtagaaaataaagatgaggatttaaatatttcaaattatagggttgattcggatgattatttagagatagttaaattggctattgaagaggaattagttttaggcatatgtataaagtatgcttctaataagggaatagtaatacattctaatgctcatttgagttcaaaaggaattgaatatttagataatcctgatttagtggagacagaaagtaaagtaaacgttgctccttctcaagtaattaatatttatggtggagaccaaaggggcgctggttttggaatgaatgccactattaataataattttgataattctcttgaggaacttggtgcttttatttctagactttctgaaaatgagcaaaaagaagcgaatgaaatattagatgcaattaagaatggggatattaagccaggtatgctttctaggttctctactttccttgagagccatcctaatttaggcgcttatactggaaaagctattgtttgggcactaacaaaattataaaattaataatagtatgctaatattaattttgaaaaataaaatgggtagatttgaataatagtagtaaaattaatcattagtgcttaataacacaacattaaaaaagctaataaataaaaggtctcatatttaaattttgagatctttttttatagtttttatcgattcctaaaagaattttctaattgatatatccgtctaagtaaaatctcctattgttactaaatgacagctcgtgtaaatatcattataatagaaccatgatacaaacttcacatacagaaagggaaaacaaccatgacaaaaattcgtattaataaagaaaaaatgaataatcatgctacaaccctaggtgagagtgcgggaaagttagattactatcctttgaaaaatgaaaacatgagttatacgcaaactaattctatccacctttttcgggaatcattacttgaactacttgaaggcatcgaaaatttaggatctgttgcgcaagatgatgctactcgaatcaagcaaatgggggaagcttttgcaaaacaagataaatccatcagccagaagatgaatttggaggtgcgttaagtggataaacgtacccaagaattaggtgaaataaaaaaagagatggagcgagaagatgacgctctatacgctattaaaaataaaattagacatttagaggatgtggaagaagatattcatcaagctagacgtgaaatggatgacatcctttatcatatgaaagaagcttggcgaggagaacacgcagaggatactttttggcaaatagaagacgaggtaaatcattacaaccggaaaactgcttgcatgactaccgatattcaaaccgaactaaataatgagcaaaaaaagcatcaacaaaatctccacgcgctcgaaactaaacaacaggatatcacaaaggagatgcgtttatgactcgaatagatattgctgaagtaaatcatttttcacatgaattaaaaatagccaatcaacaggctaaaacacaaattacggcaatccaaaatgctatcattgcttatttacaagatgattcgctctccggagaagcaattagtgcgtctaaaggatattatgcagcgacttatttaccgctttgtgcttctatcaaacaagcactacatgtcagcgaggaatctttaaggaaatatattaccgactttcacagtcaagtagatagttctccaagtgcaaaaattgatgcagaaggtctgtatgaattagatcagaaaataaatcgtttagaaaataaattagaacacattcaattagaattaagttcgatgacagcagtttctaggcagggcgaaattaatgcgcttcaaacgcaaatatttgccaattataaaaaagaacaacttttagaaaaatttcttgattttgaacgtgctcatagtcatttttttcaagaattaagtgacttagctcgagcaatcaatcgtggtgtgcgtgatattcaggcgaacatttcttttaatagccaaactgggatgtacaaagtagataaattaaatgcttcaaactttgaacgacttgtggatttatacgcttctcaaaaagcaatagatgacaaagtaaaagctatggaagatattggaatgcttccttatattccagaaggaaatcgtgccggatatgttacaactaatggcaaactaaatacggaagcgacgttagatttagttaaccaacagatgatttattggcaaaatgaaaccggtatgcgcgagttgtttggcgttggagctttttatcgagtagtttatggtttggatgcagttactgctgaaaggattggtggcggacaaaggctagtggatggctcaacggtgtttttacaatatgttggagcttttggagtgagtggtttttatgctgagtttgggcaagtacgaaaacttgattatttgcctacctctggcataaagttaaaaacgagtccatgggagaccacgacggttttagggacttttaaagatgatacaaaatatgttcttgaagaattaggtaatatcaaatcaactgattttagtatgaaaaaaaatcgttttaacttattgaatactcctgatgacctatataagacaccgaatcaattttgggcagaatataatcaaccttggttagataaagtaattgcacgaaatgatgatgttattttatctacagaaccaattgaggataatttgtataggattaatagggaaactggattaaaagaattaactggttttggtaaagaatataattatttacttgaacatggttataaatatgattcaaaatcatctaaaatgattaaaaaataggagagtgatcaattggatttttataaagaagttgaaaaaatattcaaaggatatgagcaaaattatcaattgaagctaactaaaatagataataatgaagttgctttcatcggagaaaattatgctttaggtataggatggagcacggatggggtggatttacattatttcaaactagataattcgacactcagtaaatttagtttagataatttattaaacagaaacctaactaaaatcgaacgagaaggaatacttcccagcacaacaatttacgagaaaataattaatgaattaataatctgcgaaagaggattcaataatcattttcaagaattgctacagggtgaaacattaagcggctatggaaataaagaatttgtttcgaatttggagaagagtattattgaacgtgaactattgactcgataataatgcatattaggagaaccgcattatttctatgaatttgattgcataaaatcttaatacaaaaataacaaagttggtggatttaatggagtttaagcacgaagtagaaaatatctttgcggatataattcaagaatatcaatttaacttaattaaagtaaatgaagacgaaatattgttattacaccctaattatgctctaactatatggaaaagtagagaaggtattgatgtttattatctgtttcttcatagcttagaaaaagtgaaaataaccaatttcttattttcaaattatgaaaaagatttgttagccaatataactcctgccaataatttgaccaaccaaatttctaatagcttacttattcatgcgagaggtttaagcaaatatttccctgaattgttatctggtcaaaatgactgggtaaaggagtttaaagagaataagttttataatgagccgagagctattaacaaagacgagtattcagcctatcaaactattataaaaaatatcaatggcaaaaaaattgaaggatttcaaaatgaaatatgaagcagattttataaatagattcaaatcattaatagaagaattccagttaaattataaagttatatctgaagaggagctagcactttttggttctaattttgcgcatgtttttttgattcattttgatgaagtttctttgaattatgtatgccgtgataaagataattcacttgttagttatgatgtatggtcttattttttgcatgtctttgatgataaagatagggagaatttgccaaaatataattctgtgcaggaacgggttgatatttcgtttttaatacttgcaagaggtcttccgcgtcattggagtagtgtgctaaatggagatgacaagtggttggaagattataagcagtatgaattagcccgtgttcctagaaaagtaatgggggacttgaaggattgtttgagtttatatatttaaccaagaaatgttgagaatgtaacagcaaagaggagttcaaccatgaaaatagacggtaactcaaaagaaataatccttaaaaaagtgaatttctactccataataattttaaattaatagaaataaaaataacggatgtcacaacttattaattagaaaagctcataaaatctctttttatttcacaaacaataatgtactatgaaaacatgggagattcaaatacgaaaggagaaaagaaaatcaatcatacacaaaagggtaaaattgatttcactttctttgtgtttatgctttaaaacctttaacaattaaaaaaacatcatgggatttttgtatttaggacaacaacgtataaacaatagtgtaatccagcacaataattttaaaggagcgtaactttatgaacgaatttccagttgtatatgaaccagagtatatgacaatttatttacttgttatcatcggtgtcttttctacaacattggctttatcacttgaaaaatataagttcactttagcgggaaaagcgttgattgggatgtgttttatttctctagctgtgttatttatatatgttttagagttagcatatctttcggatacagctgatttgttatttcatacaatcggtgtttgggaagtagtgcttttcacacatccatatattttcttaatacttgcaatcttgctcggtggggaaaagaaaccgccacatgtgcccaaacctaaaaaataaactatctaagtcggcggaatgggaagatggttttcctctaggattgtgagaacggtataatcagctagctgaatcagtggaaaagtaagcttgattcggtattattcaaaaaggaatttaaagtcgaaaatcgtttgataggttttcggcttttttattattgatgctttgaaaatattaaagcagattaggaggaataatatgaagtcgcagcagacctttatggtagaggttaccttttattctagtgcaagaaaaacggttccggaagcggggtatcggccgcattttgtgatggagttggatgaggatcgggaatatttaggagttgaaatttatgatatagaagtggatacgctggattcggtggggtatgcaatgtgttcttttttatatgaacaagagggcgttggttatagtaagattcagccaaataggtcttttatggttatggagggcgcgagtgttgttgggagagggaagatagtgtcgtttcatttgtaaatgacagttaaattgatttatgcgttttacacagtataattaaactataaacctatcaaacgaaaaatgatgattccctcctatttgaaaaatacatctaaagggggagtctttattaatcttgaccgaagaacttgcgtaaataaaaaataaataggaagttgaaaaaaatgatacttataaataaacgagcggaaaaacaagattaccagacaattttagcgatttgggaaaagtcagttattgtaacgcatgattttttaactgcggaagataggcagttttacaaagaacaaattcctttgtttctagataatgtggaactgttcttatggttcgctggtgaggaggtcattggttttagtgggacgagcgagcgggaactagatatgttgtttctggatccggtagccacgggtaatggttatgggagtcagattctgggttggctaatagaaaataagcggataaacctggtggatgtgaatgaacaaaatgaaaatgccacgagattttatttgaagcatggatttgtggtttcttccagaagtgacttggacggttttgggaagccttatccaattcttcaattgcaactgaaggagagagttaatggagtatgaacagctgttacaaagcgaacttggtgaacttgaaataattcgggaagaactacaaaacaaagaatatcgaggaatgattgtaaaaacggctaaagatggcacaacgattcggacgcgtttggcgaaaaaaacagataaaaaaacagggtactttgttgctttttgggagaaagatgaacttggtaagaattgtccttttgatgagaatgatagcgctgattttttatgtattgttgttattgatggtgatttgaacggtttatttgtttttccaaggcagtgtttaattgaaaagggaattttaactagtgaagttggtattggaaaaatggctgctagattttatccatcgtggtgccaggatttaaataaaacagcggaaaaaacacaagcttggcaacaggtgtattttaaaaattattctataagaaaagaagaccattgatctggtcttctttttattgtttagaaactacttgctcgcagtaatctaggtaagcatcgtctactagaaaatattttggaaccattaagccaacaatattgatgagtagctctgaattagcgatggcaggattaatcatttgatgcgagacatttttaatggttttggtttctaggttttcttttttgatttgtttggtgtaaacatcttttgtttctgctgaatcgacatttttatctttttcagctaagacgaggtagatttttgcttttacttttgaaaggtctagggtggcatcttggttcatgtttttgcggataaagttgtagcgatctggggtcattttttctttaccgccattttttttgtagctttcgtaggttttgttattagaaataagggtgctgtcggtgaggaaattttgttgtgcttgcttaacttctttcgttgttttaccagcgtctttcgcttgccagccagtgttgtattctccttgacgcatccagttgatagcaggggcggcaaggattgagaaagcaatctcattatttgcattcattgcttttgggatcacccaaccggcttgactagcgccccataagccgattttggtggtgctgtctgggtattttattttcatccattcgatcacttggttgacttcgtttgcgcgatcatccatggactgatttagccaattgcctgaggatttaccaacgcctaatttatcccatgaaacagatatatatccttgtttggcaaatcgttccatcagcggtttatagccaccgttttgagttgcttcttgtgccccgtcaccatgaacaaatacgataatgccttttggtttctcgtgttttggggttgtcacgaccgcagaaagttttccaccagtagttgggattgcgactcttgtttcgttcatttcgaaatcgtttccgatgaaaagaatcgctactaatatgacgatgattgcgcttattacaatagttgtttttttccaacgtttcattgtatccactccattttttgccattctttaataccggtgagtactcccatcaatgtgctattttctttttgaatcacttggaagccaatagttctatacagcttgcaagcgccattattgttcttggcaacgtataaagttatctgttcatcatgaaaagtttctaggcaatgagaaattaacgtttttccaatgccttgaccacgaaaatttggcgaaacggttataaagtcaatatatcgttcattttgaacaggtttgtgtgatagaagactgaggaagaaaatcaatttgaggcactgtgaaaatgataaaaattttcttaggttttgatatagcttttgatgagagtcactcttgctcgttacaaacatgcaaccgcaaattagctcatcttgtattgcaattagtaggttttcgccttgttctgtataaatgtaatggcaaaaagcgtatataatgtcacgtgcttctgtttctttgaataacgtttttgtgaactttgatttgaaccctgcgaaaactaaagatgttacttcttcaacgatattttctttttcaaatgaattgatgcttttaatggaaagtgtcataacggcacttccattgtgtaaaccattgcgtctggataggcgagtgaagggtagatgttttcgtataatatcatgcttgttgtagggcgttttaattcttctaaaaacagttggatttgcgtttcaatggttgcttcatctttggcgataaaagatttacaagcatattcgccggctggaaaagtataatcacttcttttttttatgcttttaaggcagattataccagtgtcttgtttggagaaaatgtaaaaaggttcctctaaatccggtagattgtgttttgcggcttgggcgtagttgatagtgttattatcaattatttggttaggaacttttttaaaataacgatcgtctttagctacaaatgtgatttcatttaaacgcatttctttttgcgaatggatgattttttgaatcgttttttgaatttctactaactcttctattttttgttgcaaatcttgttcagcctgctctaacatcggagtcactttttcactaagcaaactttctttgatttcttgaatagaaaagccaatttttctaaaaaggataatttgatataaacggtaaatgtcggcttcttcaaaataataatagccattttcgggatttcgtttaggaactagaataccttcatcgatataatgacggattttatatttagatatttgaaaaagttgcgcgatttcgccagtggaaagggtaagcatctgaaaacctccttatgatttagttttagtataaactatgtggttaccacgcagtcaaataaaaaaacaaatgacaatgagaatcattatcaaacgctgatttttgtgatataataaacaaagatttattaatgggggttagcgatcaaatgggaaaagtagtattgaaaatggctcatactgccaaaaaatcaaagaaagtattaaggtatcttgaaacgaaccttaatgtaactcgggggaagtacaatgattgataagcgtttgtttcaattggttgaaaagaaatctttagtgttattaattctttttcgtgtgcttagtttggggctgatgattggtctttggcttatttttgctcaacaattaacgcattatttagagggccaaagtgtcaattggttatggcttattggaacggttgtagtcgttttagttggcaaagcgatacttaccaaattagccgagaaacaaatttaccaagcatcggcggaactgcgtttatcaatgcggcgtgctgtgatggaaaaagcttttcggttaggcaacaacgaaggacagctaccggcatcaacattaacgcagctcgcagtagatgggatcgaacaattagaaatttattattcacgttttttaccgcaattattttattgtctcatcgcttctttgatgatttttggaagcttagttggatttgcgtggcagccggcgattgtgttattaatttgtatgccgatgattccgattgttattatggcagtgatgaaaattgctaagcggattttgagcggctattggtcggattatacgaatttaggaaccaaatttcatgaaaatttaagtggtttgagtattttgaaggcttatgaccaagataaatataagcaagaggaaattgtttctgatgcggaacgtttccgtaaagctacgatgagtttattatcgatgcagctgaattcgattacgattatggatattatttcgtatagtggggcggcacttggtattggtatgtctttaattatgttcacaaatggcaatataagtatgactggcatgttgatgttcttactactaagcgccgaattctttattccaatgcgtcaacttggatctttattccatgtggcgatgaatggaattagtgcatgtagtaaattgttcgcttatttagagttaaaagagcaagtttatggctcagaagaattagctaaaccgttagaaaaaatggaagttcgtcatttaacatatacatatgaagaaggtaaagctaaagcacttcaagatatatcagctcatttcaataaaggaagtttttcagcacttgttggaaagtctggctcaggaaaaagtacttttgtgcgagtgttattaaaccaattgcctggttatcaaggggaaattatttggaatgatgttccgttagctagtttgagcggggaagctattcgtaaacaagctgtgttagtagataatcatggttatctttatgcaaatagtattcgggaaaatttattaattggtaattcagccgctaatgatagcgatttgtggaatgttttggagcaagttagtttggctgattttgttcggaagttaccggagcaattaagtgagaatttagaagagaacggaagtaatttatctggtggacaaaggcagcggttgttactagcgagagcattgctgcgtcaagctgaagtctttgttttcgatgaaattacgtctggtgtggatttggaaagtgaaaaaattattcttttggtgttgcagaagttagctaaagaaaaaatcgtgctctttatttcgcatcgcttatataatgttttggacgcggatcaggtactcatttttgacgcggggaaattggtggaagtggcgagcccagaacgattgcaacaagaatccaattacttcaaaaattactttttagaagaagaagcgttgctgaaagggggagcatgatatgtcagaatggacgattattggttggttattaaagtttgttaagccgttacgaggaaagatgattttggcaattttacttggtattataagtaatttatcggttatcatgatttctttgatcggtacgtatggcattatcgcggtgattttaaagcaacctctgaatccgtataaatggctctttgtaatggttgcttgtggtgtggttcgcggtttggcacgatattcggaacaatatttaaatcatgatattgcctttcgtttacttgcgataattcgtgaacgtatttttgcgactttgcgaaaactgggaccagctcgtttatctgggaagaaaagtggcgatttagttgccgcgattacaacggatgtcgaagctttggaagtgtttttcgcgcatacaatctcaccagtttttattgcagttggtacgacgattgtaactgttggctttttggcgacctatgatgttggtttagcgctcatacttttgctaggacaaatcttggttggtgtcgttttgccgatgattagttataaacgaaataaaaaaatcggaactgcttatcaaaaagaattcgttggactcaatcagatggtaatggaaaatattgcaagtttacaagatatattccagtttaaattgggcgaagagcgtttaggaaaactagaagaacaaggtgaaaagctcaataagcagtataaaaaaagaatacgacaaggaagcgagctccaaatatttggtgaatgggtgctaattggtacggcgactttaattttagtgctaggtagtctttggcaattaccgcttgaaacagtattaattggaaccgtgcttagtctgagttcttttggatcggtattggcattaaacgctttaggaacagcgctgttaactacttttgctagtggtaagcgattatatacattaactgaagaaaaacctgttgtattatttaacggtcagcttgaactatcggattttgaaagtgcggagttagataaagtgagttttagtcatgatggaaaacaaccacttttaaacgaaatttcgctagcgcttcctaaggggaaatggctcggcatcggtggggaaagtggcagcgggaaaagtaccttagtaaaactactgatgcgttactgggatccagatggtcagattaaattaaatgataacgcactccctgaaattacagagtcttcgcttcataggctggaaggtgttatggagcaaagtacgtttttatttgaagacacgctcggtaataatattcgtttaggaaaaaaagatgctactttggaagaagttaaagaggctgcccgaaaagctgctatcgatacatggattgagactttgccagaaagttatgacacgatcattggcgggcaatcacgaaatttatcagacggcgaacgccagcggattggcttagctagactatttctccatgatgccccgttattattattagatgaaccaacaagcaatttggattatattaatgaacaagcgattttaaacacgctccgtttagaaattcaagataaaacggtgctggtaatttctcaccgagcaacaacattagacttggcagaagaacaattatttatagaaaatggtgcattgaaacgtgcagtaaaataataaaaacagcttgtatagtttacaagctgttttttatttataaatctactttctctgagctttcgaaaaattcaaccgtgtcaagttctgctcatctgctgtgcaatataaataattcgcgttttacagaaccgctcaaaatattttatcgatttgatgagagataatgtccaaagtaaatggacgctggtttttcatcatatttgacgtactatacaaaaactttcccaatttgctcaaatagaaattctcgtccaaacaaaagaatgaaaatcaagaagagcatgacgataccaaaaataaatactccatatacaagatcaaggggatagcgatgatcatgttcaataatatcttcgcttaatgaagctaatttggcatcaaattggttaattaactcaacgaaattatttcggccgataaaggcacagtcgattttctccattttgttttctgtttgaaagaatagttccatcgtttctggaacttgatacttcaagaacctacgaaaaggttggaagttataacttattcttttcacatttgcaagatgaatcgtttttgttttgttgcgtgtgtgaataataaaagcattctttgtgacctggatccattcttttggcgggagtagaagtttaacaattaaatatcctataaaaaatagagtaataagaccatagtaaaatgattctggtttttctattgacaataaagttaataagccaaacaagaaaataaaagataaagaagttaaagctgttccgattgttttaagtttgtctttgtaatatatcatgatgaacacctgcttgattgaatttatgttgaatttaatgataacattgtaaaatataatcatcaagttcattagtgaacttttaactaccaagtaaacaaggaggaacttcatggaaatcacattacaacaacctacaacagctgactttcctttcattgaatggttgtggggagatttagcaacaacagaagtgctcggcggaccattttcttttccagaagaaacgcgaatggactggctaaaatcaaaatcacaagcgagcaatgcttattttattataaaaaaaggtacagaatctgttggtgaagttagttttcgcgattttgaaaaaggaacagctcatttaaatattaaagtggctgcatgttataggggccagcgaatcgctcaaaaagctttgcaattattcttagattttttccaaactgattgcggcgggatagttttgttggatgaagttagacgggaaaatgaagcaggcattgggtttctcgtgaaagctggtttcgaagttatagaagaaaaagaatggacgatggtgctcaaatggagtgttcaagcagaggggagttttgaatgagtaaacaaagatgtgcatgaggaattataaaaaattagcaggtaagttagatttaaaagtctaacttaccttttttagtagttaaaaaagctgatttcttatattgattcattttttagacacattttaataaagaataaatgggcgtgataagtccagtgaaagcaatattagcaaggccaaatgggaattagcttccaaataaagcgaaggaaaataatttcctgaaataagaaaaattgcctccttattctattgatttgattatataagcggagtattatgttgattgacaatcaaggaggatactatgaaaaaaacgatcaagattacaaccagtttacttttgagctttgcttgtgtatttagtgttggggattttactaagccgcatacagtcgaagctgaaacagtctattcacttacaaatccaaagccgattaatgaaattttttctgatccaaagctcgcgcaagttgtggcggattggttaaagcttccatcagcgactagcgcggttacgcaaagccaattgaatacagttaaatctttgcactttgattcaaaaggtgttcaaagtcttgaaggagtagagtatttaaaaaatctcacgcaagtatttggctatggtaaccaagtgagtgatctaggaccattaagtaatttaacgcaactcgaaatcatccagatgccaagaaaccaaataagtgatttaacacccatttcgaatttgacagcattaatgtcacttgattttgaatttaataatttacaaacgattgaaccgataaaaaatttaacgaacatgttagaactgaatgttagcgcaaatcctatttcggatattagtgccgttaaaaacatgacgcaactggaatttttgactataagagactgtgaggtaagtgatttatcgccagttgaaaatctgtctaatatgctgatgttttgggcagggagaaataatattagtgatattacgccgctcaaaaatatgcccaaactgcttggtttaagtttatttgggaatcaaatcaaggatgtgagtgtggttaaaaatcttactagccttgaagatttcgatttaaaagcgaatcaggtgagcgatattagtagcttagcaacgtcaactacactcgagacattaactcttagtttcaaccaaataattgatatttcgcccctgaaaaatttgaccaatttaactaggttagaacttgagaaccaaacgcgtgtattagatgcggttgaggtagataatccattgattttacccgctccagtaattgatgaaaatggcagcagagtacagccgacaaaagtaagtcatgcgggtatttatgcaaatggcgagattacatgggaagggttgcaaagtaattatattctaaattacgagtataatttacccgtagcaattggttcgttaacaacaacgtattctggtaaaattacccagccactgttggagaagcctgttgatccgattactccggtagacccagtagacccggtagatccagtagacccggtagacccggtagacccggtagacccggtagacccggtagacccggtagacccggtagacccggtagacccggtagacccaatagatccagtaaacccggtagatccaatcactccagtagacccgtcaaatcaagtaaattcaactgatccagtgaagtcagttcttcaagcaactgaaactttaataaaacagacgatatccgttaatccgattgtagctaaagataatagaaatttaccgaaaacaggggatagtggaatgacttctagtttagttggcggtttaattctagctgtttctagtttggtattattgcgtaaacgaaaataaaaaaaggaatttggcttttagtcaaattcctttttatacgatttttgtgccttggtgaaaggtgagtttccacgagccattttcgaaaatccagatgttacttcgcattgtataggagttttcacttagatttttaagtttataatatgataagacctttgtttcatctaaaatttttatatcataattcatgatttctagagcgctatcgccaagtgtttttagcgatttgtaataggaaaagtctttaacaacaccactttgcgtgatttcaatataagattcgcttaaaatatcgataatttcggacatggagtgacggttttcgagcgataaatgtatttggtcaagttttttgaagttttctttcgttaattccattctaagtcctccgttttaaagaaataaaaaggttcacttgattttgtaagtgaacctttttgtgttattttattccgtcacgattttgaatgatttcatttacgatgccgtaatcttttgcttcatttacagaaagccagaagttgcggtctgtatctttggagattttttcgtacgattgacctgttgcttcggcgatgagacgattaattctttcgcgcatccggataatttcttttgcttcgatttcaatttctgtgctttggccttgaacaccgccagctggttgatgaatcatatagcgcgtgttaggtagactataacgattttctttttcagcggctaggtaaatagtaataccagcgcttgcaacccagccagttccaacgattttaacagtaggcttaatgaatttaatcatatcatgaattgtgtcgcctgcttcaacgtgaccaccttggctattaataaaaatggtaatcggatcattgctaatagattcaagtagtaaaagctgcttagaaacgtcctcggctaactcctgattgatttccccgtaaattaacactgtgcgtgtatcaatcaatttttgggtaaggatgtttgtgatattttcattatttttattctctgccatgaaaaaattcctccttaaaaagccttagtttatttgtaatacaggtatcttatcataatggtcgaaaatggtcaaacattttgaatacaaaaagaaaacgctttaggatagcgttctcttcttaattttatacgaatgcgagttgccaagtaatcccgaatttatcagtaacccaagccacttttcgaagcgcttcaacttcttcaggtcccatcataaccgtgccttctttagctagtttttcaaaaagggtatcaaattcatcttctgtgtctgcgaaataaagggttgttgtggcccagctaaagtcaggcgaggcgttgttagtcatgtccataatcataaatgatgctcccttaatttcaaaagtagcattcaacaccttgccaatatcgccgccttgttctggttttgtgaagtaagttaagccgatttttttcgcatctggaaaagtgtctaaataaaaattaaaagcttcctctccattaccattaaaagtgaaaaatgtggagattcgttttgcttgattaaacatttattttacctccttttgaattattttaactatacccgaaaaatgtttcaattatgtgttaaaatggagaaaaatgtacgggggcatgatgatgaaatatccgataatgcttgatattacagggaaaagggttgtcataattggcggcgggaaggtggcgcttcgtaaagtaaaggggctactccataccggagctgatattttaattgtcggattagacgttttgccagagattaaagagcttcaagtgcaggtgaaagaagaagcataccgggccgaacatctagctggtgcttttctgatatttatttgtacgaataacccagaagtaaaccaaatggtactgaaagattgcttgccagaacaactagtgaatgatacgacagaacaaaagaattccgattttttcaatatggcaactgtatcaaaaaatgagttgctagtcggtatttcaacgggcggcggtaatcctggatacgccaagaaagtaaaacgtgaagtcagtcagctagtagaaaatttagaaacagaagaaatcggaaatcgtaataaaaaagataaaacctgctaattttagtaggttttttattctattatattgctctcttttaggttgcaaaattttactatagattttggaatgtaaacgctctatcattgaagtatactgaaaaaatattaagagggtgctgagccaaatgtccattttagaaaagattaaagatgccggagttgttggttgtggtggagcgggctttccgacccatgccaaatttagcggtgaagtggaatacttaattattaacgcagcggaatgtgaaccgctcctaaaaacagatcattttgtcatgagaaaccatgcagtagaaacgattaaagcaattgaaatggttaaaaaccaagtaggtgcagagtttgccgttattgcaacaaaacggtattacacagaagaaattgcggctttacggtcagcaattacagaactaaatgcaagcgtgacaatacatgagatggataatgtctatccaactggcgacgagcaagtgatggtctttgaagtgactggacgcgttgtgccaccaagcggtattccacttatggttggctgtattgtatcgaatgtctcgacaatgtggaacgtctttcatgcaattcaagatgacgcgccagttattcgtaaacagttgacagtaactggagcagttggagagccaaaacttttagatgtaccagttggaacgccatttgaagtatgtttagcagcagctggtggaactaatttagacgagtatttatttttagatggtggaccgatgatggggaaattaaatgatcagtccactattgctgaaaaagttgtaacgaaaacaacttcgggtttgattgtggcagaggatacgggttatctgcacaagctacattaccaaacagtggaacaaatttttaatgaaacaaagtcggcttgtattcagtgttcgctttgttcggatttatgcccgagacaacaattaggtcatgatattcatccgcataaagtcatgcgccattttgcggttgcagaagatataacggatattaaaccagatccgatctgggaagaagcgatgatttgttgcgaatgtggtatttgtgaggtaatcgcttgtccgatggggctttccccgcgccaagtaaacattcatgtgaaaaaagagcttttaaaacaaggtgttcgttatcaaactgataaaaaagaatttacgcctgacccgatgcgcgattataaatcgattgctccaaaaaatattctaattaaaatgggcttacagcaatatgctgatgttcatttagaaacaatgcattatttagatgtggatgaagtttttatcccaacaaaaatgcatattggtgcgccgtctattccagtagtaagtgaaggggacatcgtgaaaaaaggcgatttaattgcgaaaattcctgatactgctcttggggcaaatatccatgcaagtattgacggtcaaattattcgtataaccgaagaacaagttcatattaagagggtgatgtcatgaaaatggatacattaggatttctcgaattaaatagtatttcgaaaggcatcgaggcggttgacacaatgctaaaagcggccaactcagaattgatttatgctaaagcaagctgtcctgggaagtattatatattaattgccggtacagtggattctgtagctcaatcaattgaagcgggaacgaagattggtgcggcaaatatcgttgggaacttagtcattcctcgcgtgtccgaccaagtaatcaaagcaattaacaaaacggaagtgccagatgagatgaatgcagttggtgttatggagtattattcctgttcaggatcaattattgctgcagatgccgcggtaaaagctgcagatgttcagctgatggatattcggttggcgacggggattgctggtaaatctttcgttgttttaactggtgatacagcagcatgtgaagcggccgtggaagcgggacttgcagctgctaaagaggaagcacttttaattaataaagtagttataccaagacctcgtaaagaagttttcgagagtttaatctattaaaaagataacaatatattgtcatagagtttttgagaaaggtacgcactgactgtggttgcgtgccttttgaacaatctgacaaaatagtggcgcttaaatatgataggattattttgagatagtttgtctagatgaggagtgaagaaaatgagttttgatgataataaagaacgcgtaatacaagaatatgtaccgggaaaacaggtgacgctggcgcatttaatcgccaatccgaaccgtgatatttatacaaaattaggattagaagaaggcgcaagtgcgattggaattttaacgattacgccaagtgaggcttcgattattgccagtgacattgcaactaaatcaggtgacgttcgaattggctttattgatcgttttagtgggtctgttgtacttactggtgatgtttcttctgttgaatcagctttacaacaagttgtttattcattacatgagattttggacttttctattccaaaaatcactaggagctgagtcacttgaagaaaatgatggtaatgggttcagttggttgtggtaaaacaacgctgtgccagaaattacatggatatgatattttatataaaaaaacacaagctgtggagtattttcaagaaatgattgataccccaggcgaatttgtacaacatagacaactatacagtgcgctcactgtgacttcggctgatgcatcagtaatcgcgattttacaaagtgtaacggagaagaagcagacgttttcaccgatgtttgccagtatttttgctaaaccggttattgggattgttacaaaagtggatttagcggaatcggacaaagacatcgagcgagcagagcgggaattacgcatggctggcgcgaagcatattttttatatttcttcggtagaggaaactggaatagaagagcttcgggcatatttggaagattaattttaactaaatgggggttattttatgcctcaagtgagggatttatctgtaattgatgtgcctggtggttgtgttttgacgagctgtgatattagcgctgggtttggtgagaaagtgcatgatggcttaagagttgcgcctgaagtgacagcaaggttgaccttgagagttgctctactagaaatgcttgcttcaggtgctgtagttgtggctgtgagtgatgttatcggagcggaaatggagccgaccggtaaacgtgttatcgcaggtctaaaagacgaactttttaaggctgatttaggtcatattgaattaaatggtagtactgaagaaaatatgaacgtaacacaaactagtgtaggcgttcttgtaactggttttgcgactaaagctgcacttaagctcataaatgtgcatgaagctgcggtcttatttgcatttggcgaaccgattgttggagcagaagttttgcagagaatgatggaaatgccagattatcctttggtcaaacagttagtttctgatagtagagtacttgaagttgtgccggttgggtcgaaaggaatggcttatgaggccaatactttagcacggcttaatgattgtgttttcgaagccagtggcgtttttaatgaagcgaccatgaataaaactgctgggccggcttcggttattttagtagcagttaaagcaagtgaagtaaaggcatttgagcagaattttccagctgctaaatgtttaggagagttgaggaattaccatggctgaaatgatgcttgtaactggtggtgctagaagtggtaaaagtaattttgctgaaaaagaagctgccaaatatgatcgtgttttatatgtggcgaccggaattgcatttcaaaatgatacagagtttcaagctaggataaaaaaacatcaagcaacccgtccagaacactgggatacttttgaagcatttaaagggattgctacttacttggagcaacatggaaatcaatatgatgtaataatgcttgattgcgtaacgatgttagtaactaatttatttttttcgttgcttggtgagcgcgagttgacaaatgagattgctgatgaagtagaagcggcgattcaatcggaagttcgtgcaattttaaaagcaggaaagcaatcctctgccaaacttatttttgttacgaacgaaattgggctaggggttgtacctgaaaacaagttaactcgagtatttcgagatattattggtcgtattaatcagcaaattgcaacggaagtagaggaagtttattttgtcgtgagcggcattccgaaaaggtggaagtaatatgaaaacattgattttattaattcaattctttacgcgaattccgctaccgatccaaataaatatggacgagattaacttgaaaaaagggagcgcgcttcttccgcttgttggggttgttataggtgcttggaattggctcgttttttctttagtagcgcttgttatgcctttgccggttgcgattatcgcgggactttttgcagaaattattattacgggcggattccatgttgatgcgcttgcagatacagctgacggattattttcttcgcgtaaaaaagagcggatgctagaaattatgaaagatagtcgtgttggtgccaatggtgtaattgcgatttgcttttattttcttttttatggcgctttatttctttctgttccaaatatacagcagattggctggttgtttttcgttttaccaatcgttgcaaaaggtgtgacaatgctactttttgcgaaaatgagttatgcaggatcgaaagaagggcttggttctatttttctaggtgttccttggtggccgattatgattgcccaagggattgttctcattgttttagcgttgtttttctcttatattgggctaattgcttatgctggcgtgttagtatttacgattatttaccggttatttgtatataagcgaattggtggaatgaacggggatacgcttggtgcaggtgggcaaatgggacaacttgtgtgcctattttgtttagtgttaatttgggggttgatgtaattgcaacttatttttgtcaggcacggcgaaactgactgcaatgcactaaaaaaatattgtggtcaaatggacgtggctttaaatgaaaatggtataagacaaatgaaacgactccaagaaagacttactgattactcatttgacttagtcgttaccagtgatttaatgcgagtaaatcaatctgcagcattgttaagtaacagaaagccaattcgttttcctggatttaatgaaatgaattttggcgattttgaaggatatacataccaagaaattagtactaagtttcctgtcgcctgggatgactattgtagtaactggcaaacagctccgtttccaaatggggaaagttttccggttttttatgagcgagtgatagctacatttaaggctgaatgggaaaactggcagaaactcgatacggtgttatttgtagggcatcttggtgtattacgcgccattgcactttttctacaagatcaaaaaatagcacaattttgggataccgattttaagcaaggttgctattcgctctgggacaataagtctcaaagctttctcatttctaatcaatagtagatttttgttgtttcaggtgaaaacgctttttttgtaaatcgtttgtggtaagatgtaggtagttaaataggtcttatgttggtggaatgtgtttgcatttctgaaagaggaattcggtatgaagccggaactgcccccgcaactgtaaggtggacaagaattgaaaataaccactgtgcgtttttgacgtatgggaaggttcaattgttgaatgaagccaagtcaggatactcgccaaataagacggaagcaactctttttcggggtcctaaaaagcgtatgcgggtagtatagcttatttgctgtgcataaactctcattcgataatggatgaaagtttttttgtttttcaagcagcaaaaaagtcatattctgaaataatcatcgaatatgactttggaaagtacttattttaaggtttcgcggtagccttttggagttacatcaaactcttttcggaagactttgcagaaatagctcgtttgggtgaatcctaagttacgagcaacattatcaatcgaccaacgtggattttttagcatatcttttgcgagcgacattttcttttggtttacataattgataaaattaacattcatttcttttttgaataatttactgaagtaataagagctaaggtagacatgacttgcaacttcatcaagtgtaattggacgattgagatttttttcaatatacttaagtgcttttcgaatttctttattatcttcatgatgtgttggtttattgtgatggaagacgattttttgtttttgttcttcgcggcttttttccatttcagatttcaagtaatactgggagataattgtaagcatttcggcagaagaattgatttttttagagctgaaaacagggacagagcgaaacgcggaaattaggtctttatcgtttttccaatcagtttcttctgtttgaatattaccaacttcactattttcttcacaaataacctgaccgctgagcaaaaatccgcttagttgattttcgacgacgattggaactgaaaaatcggttagtccagcgtgacatcgataaattaaaggttttccggttttagaagcttccaacccgccaaacatatcacatttttggcaaagcgagcgatattttgggttagaacgaatgagttggcaaaaaggagtaaagttacataatcttgaaacttcggtaccgtgtatatctacaacaactgaggctagactagtagcggctgagaactcatccatgactttttcaagaagcatttcattgcttttggtttgtagtaacatagctattcccctttcggcaatacttggcgtgtttctgtcgttcttagtatagcatatttataatgcgcttacattttcttgccatgaagataacaatatattgctaagactaatttcataagagaaagcccaaaccatgctctactggatggctttttgtcgtttatttttttgaaggcgcaaaattgtgttaaaacacgattcgcgtcttctttttttatattgtaagcggcaactatttatatattagattgcatatactgagagagtaaaatacttattttgagaaggaggtacacccatgcaagaagcactaggtttagttgaaactaaagggctagtcagcgccattgaagccgctgacgccatggttaaatcagctaacgtaacattaacagggtacgaaaaaatcggatccgggcttgttactgtgatggttagaggggatgtaggtgcagttaaagcagcaacagacgctggggctgaagcagcaagaaatgtaggtaccgtaatgagtacacatgttattcctcgtccgcatactgatgtggaagaaattttaccagtgagggtgaagtcagatgagtaagcaaaataaactgattgacgaaattctaaaacaggtaatggaaacggtcaatgatgccccggaaaaaatagtagaggatggaggatcacgtcaaatgagtgaaaaagcagttcaattaacagagtttgtaggaacagcgattggagatacaatcggcctagtgattgcgaatgtagacggacaacttttagaagcaatgaagcttgagaagtcttaccgttctataggtattttaggagcccgtactggtgcaggcccacatattatggcagcagatgaagctgtaaaagcaacgaatacagaagtagtaaaaatcgaattaccacgtgatacaaaaggcggtgcaggtcacggttctttaattatctttggtggtgatgatgtttctgatgttaaacgcgcagtggaagttgcactgaatgaattagataaaacttttggagatgtatacggtaacgaagcagggcatattgaactccaatataccgctcgcgcaagccacgcacttaatacagcatttggcgcaccagtaggtaaagcatttggacttatggttggtgcaccggctggaattggcgttgttatggctgatactgcggtgaaatctgccaatgtagatgtggttgcttattcttcaccagcagatggaacaagtttctccaatgaagtgattctttgtatttcaggagattctggcgcagttcgtcaagcagttatttcagcacgtgaaattggtaaaaaattacttggagctttaggggatgaaccgaaaaatgatcgtccatcctacatttagaacggagggtaacgactgatgaaatcaaaacgctttgaagaattagcaaaacgcccggtcaatcaagatggttttgtaaaagaatggattgaagaaggcttaatcgcaatggaaagtccaaatgacccaaaaccaagcattaaaatagaaaatggaaaagtagtcgaaatggacagcaaaaaattagctgattttgacttaattgaccattttatcgctaaatatggcgtcgatttatctcgtgcagaagaagttatgaaaatggattctgttaagcttgcaaacatgctttgcgacccaaatgtaccacgggaaaaaatcgttttacttacaacagcaatgacaccggcaaaaatagttgaagtagtttcacaaatgaacgttgtcgaaatgatgatgtccatgcaaaaaatgcgctcacgtagaacaccgacaacgcaagctcacgtaactaacttacgtgataaccctgttcaaattgcagcagatgcagcagaggcagcaattcgtggttttgacgagcaagaaacaaccgttgctgtagttcgttatgcacctttcaacgcacttagcttattggtaggttcgcaaacaggccgtggtggcgtattaacccaatgttctcttgaagaagcaacagaattagagcttggtatgcgcggtttaacttgttacgctgaaacgatttctgtttatggtacagaacctgtatttacagacggagatgatacgccttggtccaaaggtattttggcaagtgcttatgcgtctcgcggtctaaaaatgcgtttcacatctggaactggttctgaggttcaaatgggttatgcagaaggaaaatcgatgctttatctagaatctcgctgtatcttcattacgaaagcggctggtgttcaaggtttacaaaatggttcgattagttgtatcggaattccgggagccgtaccaagtggtattagagcagttcttgcagagaatttaattgccgttatgttagatctagaagtagcttctggtaacgaccaaactttctctcactcggatattcgccgtacagctcgtttgctgatgcaatttttaccaggaactgattacatttcatctggatatagtgcgactccaaactatgacaatatgtttgcgggttccaattttgatgcagatgattttgatgattacaatattttacaacgtgatttaaaagtagatggtggtttaacgccagtgacggaggaagaagttgtagcggttagaaataaagctgcacgagtaatccaagttgtctttgataaattaggtcttcctgctgtaacggatgaggaagtagaagcagcaacctatgcacgtggaagtaacgatatgccagaacgtaacatggtagaagatattaaagcagcagcagaaatgatggaccgcggcgtaactggtctggatgttgtaaaagcattagctgctggtggatttgacgatgttgccgaaagcgtactaaacatgctgaaacaacgcgtatctggagacttccttcatacatctgccatcattgataaagactggaatgtcattagttccgtcaacgatttaaatgattacgcaggcccaggaactggttatcgcttagaaggcgaacgctgggaaaaattaaaagatattgctgttgcagttgatgcaaacgaattagattaagctacttcccattttttataaaggaggattaagagacatggttgaaattaacgaaaaagtgcttcgcggaattatctcagaagtactagatgaattacagcttaaagaagataaagtttctttccaaaaagaacagccaagtgttgcagtttcagatgaaagctttttaacagaagttggggatgcgaaaccaggaagacaaaaagatgaagttgttattgcggtcgcaccagcttttggtaaatatcaaacgaaaaacattgttggcgttccacataaacagattttacgagaagtgattgcaggcattgaagaagaagggttaaaagcacgcgttgttcgtgtattccgttcttctgatgtagctttcgtcgcagtagaaggcgacaaattaagtggttcaggcatttgtatcggcattcagtcgcgcggtacagcattaatccatcaaaaagatttacaaccactttcgaacctagagttattcccacaagcaccactaatcacactagaaacttaccgggcaattggtaaaaacgctgcgaaatatgcaaaaggtgaatcaccaaatccagtcccaatggtaaatgatcaaatggctcgtccaaaattccaagcaaaagcagctttacttcatatcaaagaaacgaaacatgttgttcaaggtaaaaacgcagtcgaactacaagtaaattaatagtgaggtgagaatgatgaatcaagaagcactagaaaatatggttagaaatattttacaagaagtaaatagtggtgcagtaacaacaaccacttctcaaaaagcaagcggagattcactgactgtacgcgactacccactcggtacgaaacgtccagaacttgtaaaaacagcttcatctaaatctttggatgatattacgctaaaaagtgttctagatggcacaattaaacctgaagatgttcgtgtaacagcagagacgcttaaaatgcaagcgcaagtagcaagagatgcaggacgtgctacactcgcgaacaactttgaacgtgcagcagaattaaccgttgttccagatgagcgtattttagaaatttacaatgcgatgcgtccttaccgttcttcaagagaagaattgcttgcgattgcggatgaattagaaaatgtgtatcaagcaacaatttgttctaattatgttcgtgaagcagcacagctttatcaagagcgtaagaaattaaaaggcgataattaaaattcacctttgctcatgattatgtaggaaatgcggtgaaatgaatgaagtatattgcaggtattgatatcggaaactcgacaactgaagtggcgcttgccatcctcgactcggtaaataatgcggagtttgttgctagcgctattacagacacaactggtatcaaaggaacaaaacaaaatcttcatgggatttttaaagcgttaaaactagctttagaaaaagtaaatgcaacaactgcggatttagctgaaattcgtattaatgaagcgactcccgtgattggtgatgtagcaatggaaacaattactgaaacaattatcacagagtctaccatgattgggcataatcctaaaacaccaggtgggcttggaatgggttcaggaattacagtacatttggatgaagtggcttctaaatcaaaagatactgattatatcgtgattatcccaaaaacggttgactttgaagatgccgcacagcagattaatgattataccgaacttggctatcaaataactgctgcgatccttcaagcagacgacggggtgctcgttcataatcgattaaaccataaaattccgattgtagatgaagttggttttattgataaagttccagttgatatgttagcggctgttgaagtcgcagctcctggtaaagtcattgaaacgatttctaatccgtatggtattgcgacagtcttccgtttgagttctgatgaaacgaagaacatcattcccgtagctcgagcattaattggtaatcgttcagcagttgtgattaaaacaccagaaggcgacgtaaaagctagaacaataccagccggacatattgaacttcaatcaggaactagaacgcagcgtgtaaatgtggcggaaggttccgagaaaatcatgcaagcgattatgtcactgccaaaacttgataatgcaagcggcgaaccgggaacaaatatcggcggcatgctagaaaaagtacgacaaaccatggctggacttactgataaattaccggcagatatttttattcaagatttgctggctgtagatacgtttgttccagtagatgttcaaggtggtctggcgggtgaattttccatggagcaagctgttggaattgcctcaatggtaaaaagtgatcatttacaaatggctgcgattgcctcagaaatcgaacaagagctaaatgtaacggtcaaaattggtggggcagaagctgaggcagcgattctcggggcacttactaccccaggaaccaatacaccacttgctattttagacttaggagcaggttcaacagatgcttcaatcataaatggaaaaggcgaaatcattgctactcatttagctggagcaggtgatatggtaacgatgattatccagtcagaaattggccttgaagatcggtatttagcagaagatataaaaaaatatccacttgctaaagtcgaaagcatttttcatattcgccatgaagatggtacggttcaatttttcgatacgccgctttccccaagtgtttttgcgaaagtagtgattgtaaaaccagatggatttgtaccaattccaggtgacgtttcgattgaaaaaattaaattaattcgtcgttcggctaaagagcgcgtttttgtaacgaatacgatccgtgcattaaaatatgtcagcccaactgggaacattcgtgatattccatttgtcgttattgtcggaggatcagcccttgattttgagattccgcaattaatcacagatgcactttctcattattccttagttgcgggacggggaaatattcgcggacaagaagggccaagaaatgcggttgcaacaggattaattctgtcgggtggtgctaatgtatgattccggttgtaaataaaccagcaatttattttcatgcagaccaaagcgcgaatccagactgtattaaacaagtattatttggaatagaagaagaaggcattccatgtgaattagaaattatgcctttaaaagacgaagtgcaagccgcatttcgagcttcagcgagttcgccacttttggttggaattacgctcaaaaatgatcatttagtgattcattatcgtaatctgccgccagatcagccgctattttcagaatatcgtttttgcgcagcgaccttggaaaaacaacgaaatatgggaatgaatgcggcgcgactcgtcaagggtgtaccttttaaataaggaggtgaaggaatgcatcaagcaattggaattattgaaattaaaggacttgcttcagcgattactgtagcagatacaatggctaaagtagcaaatatccaaatcgtggacacagaaaaagcaaaaggttttggctggattactgtgaaagtggaaggagacgttgctgccgtcaatgccgctcttgaagcaggagaacaaacggcaatagcctcagacagctttgttgcgaaaaaagtcattcctcgaccaggggaagagatttttacagtatttttgccaaaagaagaaatcgtgccagaagaacctgaattaattgttgaaacagaagacgtcgcggaacctgaaacaccggtagaagcgacctgtaatctatgtcatgatccactttgtccacggataaaaggtgatccaagacaagattgtattcattttgaagaagaaaagtaaacctaattttgaggaggaaataataatgaataacgcactaggaatgattgaaactaaaggacttgttggcgcaattgaagcagctgacgcaatggtaaaagcagcaaatgtatcgcttgtaggttatgaaaaaatcggttcaggacttgtaactgttatggttcgcggtgatgttggcgcagtaaaagcagcaacagatgcaggcgcagcagcagctcgtaatgttggagaagtacaatctatccacgttatcccacgtccacacaatgatgtagaaacgttgctaccaaaaggtttataagccgtggaaagagaagaattaaaggcaataattaagaaaatcgtaacagataaatatggtggtgcggagacagagattccaatcggagtctctaaccgccacattcatttaacagaaaaagactataaccaactttttccaaatgaacctattcaagtgaaaaaatggttaaagcaacctggcgaatttgctgctgaacaaactctcaccgtagtttcagaaagaggcgagttaaagcgggttcggattttaggtccgcttcgaaaattttcgcaagtagagctttctaaaacagatgcacggatgttagggatgaagattccaattcgtgtatctggtgatattgaaggaacaccagggatcaaactcgtttctaaacataacgaaatcttcttaccaaaaggagcaattgttgcgaaacgccatatccatttacccgaaagtgtagcaaatgaatacggtgtgaaacaaggtgatgaagtttctgtcctagtaggttcggaaatacgtagtctcgtgttaaaccattgtacgattcgagtgaataatcaatttatcccagaaatgcatattgatacagatgaagcaaacgcggcagatattgctggcgatagctttgcaaaaataatcaagtcgtgacctgataaggaggtgtggaaatggatattttacaaacagctaacgaacggatggaacagcttgcagcactaatgaataaagataccaaacaaaaggtttcagcggatcaaaaagtaaaagttggcgtcgatttagggacttcctcgattgttttcgttgtgttggatgaaaataatgttccgctttttggagcgtttgaatttgctgacgctgttcgcgatgggcttgttgttaattaccgcgagtccgtagaagttgtcaaacgacttaaagatagagcagaaaaaagccttggaataagtttaacgcatgcttctggagctattccacctggtacaatcgggaacaacaaaaaagtggttgctaacgtgatagaaagcgccggaatggaagcactttatacaattgacgaaccaacagccgctgcagcagtactagatttaaaagatggtgcagttgtagatgttggtggtggcacaacaggaattagtgtttttaaagacggtgacgtaatttataccgcagatgaaccaaccggaggaacgcatatgacacttgttctagcaggatattacggtgtctctgtagaagaagctgaagaaaataagcgcgcgcaaaaagattctagcgagcatttttctgtcatgcgtccagtagttgaaaaaatggcagaaatcacccgtgttcatctcgaaaaatctccctcagaaccgctttatattgttggtggtgcttctgcttatagccagttcaaagatacgtttgaaagctatttgaagatgcctgtttttcaacctaattatccgcagtatgtcacgcctcttggtattgccatgagttcagggagcggaaatttatgatagaaaaattagttgaaatcattgttaaacgcttgaaaattcgtgccgcaaataaaacagtcatcgctgttagcaaaatgcctcgcgatccagttgcgatttttatggaaagtgggacagttcggttaacccaagtaaacaaacattttcttgagcggatactaggtggaaaccgagcagaatcacttactatttggcttgaaactgcagcagaatacggggtaacaattgaacttgaactgtatgataacggcgaaccttggctggattataaaatgctcagtcagctagtctatccagtttttacaagcgctggtgagaggctttttcatccaagttctgaagtgatttgttacagtgatagcgcattaatcccaagcggaagtactctttgcaaatttaaaaagcagcttattacaccgcttgcaaatgaatatttaactaaaaataatattgcagtgcgggaaaggcagtgacgttatgtttatggcgaaaattactggaagcgtagtctcgacaaaaaaagaagattcgcttacaggcaagaaattaatgattgtacaaccaattgatgcgaacggagaacatgtgcgctcagaagaagtggcatgtgactctgttggcgctggaatcggggagtatgtgcttgttgctcgtggaaatgcggctaggagcgtatttgcagaaccaaatagtgcgattgattcggcaattatagcaattgtcgatagttttgataagtaaggagtgaataactcgtgagtatttatacaaaaaccggcgataaaggaacgactgcactatttgatggaaatcgtgtgaaaaaatatgatgaccgtgtcgaaacatatggttcgtttgatgagctaaatgccgaaattagtgtagcagaaaagttcgttacctcgcatgaaaacaagactttgcttagaaacgttgagcgccaattgttttacgtttgtgcagagcttgcaacagaagatgaatctgcgcttgctagtaaaattgtcattacagaagatgacattaacgaacttgaaaaagttattgatgcttatactctgaagttgccaaaagttgatagttttgtgcttcctggttcaagtaaagccggcgcgtttcttcatagtgcgcggacgatagccagacgagcggaacgattattagttcgtttttcagaacaaacagcagttagaaatgagctgttgaaattcgtcaatcgtttatctgatttcttgtatattcttgctcgagaagaagactttagacagatgctagataaagcgactaagctaattgttgccaagtacttagagcaaacagaacaaaagcctagtacgacgagcgatttatctttttcattttgtgaaaaactaatgcatcaggtgcaggttgtctcagaagaagtcggcgttccagtcacacttgcaatagttgatgcgcacggaaatgcaagatttaattaccgaatggaacacgctctcttagtaagtgcagaactagcaacgaaaaaagcatattccgccgtagcgatgaaaacaagtacagaaaaattaacagaagcagttcagccaggagccccactttatcaattagaaacactgacaaatggtgacattgttacctttggcggaggcgttccaatttacggaaaagatggagcgattattggtggaatgggaattagtggcggatcagtggaagaagatatccacattgcaaaaaaagcattatcaatgatagagaaggggtaattctgtatggaatcattagaactcgaacaactggtaaaaaaagttctcttagaaaaattagcagaacaaaaagaagtaccaacaaaaacaactacacaaggcgcgaaaagtggcgtttttgatacagttgacgaggctgttcaagcagcagttatagcgcagaattgctataaagaaaaatcacttgaagaacgccgcaatgttgtaaaagcaattcgtgaagcactttatccagaaattgaaacaattgcgacaagagcagttgcagagactggtatgggaaatgtgacagataaaattttgaaaaacacgttagcaatcgaaaaaacgccaggggtagaagatttatatacagaagtagctacaggtgataacggtatgacactatatgaactctctccgtatggcgtaattggtgcagtagcgccgagcacaaacccaacggaaacattgatttgtaattcaatcggtatgctcgcagctggaaatgccgttttttatagccctcatccaggggcaaaaaacatttcactgtggttgattgaaaaactaaacacaattgttcgcgatagttgtggtatagataatctaattgtcaccgtggctaaaccatccatccaagcagctcaagaaatgatgaaccatccaaaagtaccgctacttgttattacaggtggtccgggcgttgttctccaagcgatgcaatcaggtaaaaaagtgattggagcaggagcagggaacccgccttctattgttgacgaaacagctaatatcgaaaaagcggctgctgacatcgtagacggagcatcttttgaccataatattttatgtattgctgaaaaaagtgtggtagctgttgatagcattgctgatttcttgttattccaaatggaaaaaaatggtgcccttcatgttactaatccaagtgatattcaaaaattagaaaaagtagccgttaccgataaaggtgtaactaataaaaaattagtcggaaaaagtgcaactgaaatcttaaaagaagcaggaatagcttgtgattttacaccacgtttaatcattgtggaaacggagaaatctcatccatttgcaacagtagagctattaatgccaatcgttccagttgtaagggtgcctgattttgacgaagcccttgaagtggctattgaactcgaacaaggcttacatcatacagcaacaatgcattcacaaaatatctcgagattaaacaaagctgcaagagatatgcaaacttccatctttgtcaaaaatggtccgtcctttgcgggattaggctttagaggagaaggtagtactactttcactattgcaacgcctactggagaaggaacaactacagcacgtcattttgctagacgccgccgctgtgttttaacagatggtttttcgattcgttaagaggaggcaaagttaatgaatagctttcaaatcaagacaaaagtagcttttggtacgaatagtttacaagttttaaaagaaattaaaaataaaaatgtttggattatttgtgatcgttttttggcggatggagagggacttcaaggtttagttgggcagttagatgcatctaataatgtgcatattttcaccgatgtagttccagatccacccatttcaaaagtagctagtggtgttagtgaagcaggaaaaattcagcctcaagtcatgatcgcttttggcggtggctcagcaattgatacggcaaaaggaatttactacttcgcaaaacgcttagaaaaaattaatattagtacttttatagcgattccaactacaagtggcactggatctgaagtgacagctgctaccgttattactgatccaacgacaaaaattaagtatccacttttcttagatgaacttattccggatatggctattcttgacgcgcaactcgttgtcacagtgccgccagcgattacagcgaatactggaatggatgtattaacacacgcgattgaagcttatgtttctaaagctgcgagtgattatacggacgcattaggtgaaaaaagtgtgcaattaacgctacgctttttaacgagctgttatgacgatggtcgtaatttagctaaccgtgaaaaaatgcataatgcgtcgaccatggcaggtatggcttttaactgtgccaaccttggtttaaatcatagtattgcgcatcaactaggtgcacagttccacgtgccgcacggtctagctaatgcgatattacttgatgcggtcattcgttttaacgccttcaaaaatcgtgatactgaacaaaaatatgctgaactggcgcggatttgcggaatggcttctagatctgattccaatgaaaccgctgtccgtctgcttcgtgaaagaattgtccaaatgatggaacacatgcaaatgccacgaacattgacagatgctggcgtagcaaaagaaaaagtctatgcaaaaatggacgaaattgcaacaaatgcactgaaagacgcttgcttgccaacaagtccgacgacaccgacacatcaagaactaaaagaaattttagaacaaattatttagattttacgttaaaaaggaggataaactatgtcagcatatttggcggaatttattggaacgatggtacttattatgtttggtaatgggcttttagcaggtttaacattaaataaatcattatcacaaggagcaaactgggtagttgttacatttggttggggttttgctgtaatgattggtatttatgtcgctggagcatatagcggagcgcacttaaatccagcagtaactattgcgcttgcagttggaggttcattctcttgggcagctgtagttccgtacattatcgcccaaatcgccggagcatttgtcggagcatcgattattattttacattattatccgcattttaaagccacaccacaagaaattgatacacacggtattttttctactggaccagcgattcgaaatacaccgttcaacttaatcagtgagattattgcaacgtttgccttcatttttggattacttatgatcggcgagaatagttttacaaatggtttaaatccgttaattctcggtttcttagtagttgcaatcggaatgagctttggaccaacgacaggttatgcgattaacccagctcgtgatttaggaccaagacttgcttactttttactaccagtaccaaataaaagtggatcagactggcgttacgcttggattccaattgtcggaccaatcattggcggtctcttagccattggactatttaacattttattataaaaaataggatggagtaaacaagaagtaagttgtttactcctttaaaaatgagaaaggactgagctatatgcacaaaattatggcgataaacgcagggagttcttcactgaaattccaaatttttacgatgccaggagaagaagtcttagttaagggcttaattgaaagaatcggcttaccagatgccatattcaacatgtcctttcaaaatgaaaaaatcaaggaaactcgcgcgataaataatcacggagaagcagtggaaattctactggagcaattgaagacgcatcaagtaattaatgacctaaatgaaattacaggagtgggacatcgggttgcgcacggcggagaagcttttgtttcttcatgtattgtaacggatgatgttgtaaaggggattgaagatgtaacaagtcttgcgccgcttcataatccagccaatatcatcggcattaaaacattccgcgaactattaccaaatgccgtttcggttgcagtgtttgatacggccttccatcaaacgattccagaagaaaactttttatatgcgctcccttatgaactttatgaaaaacatcatattcgaaaatacggttttcatggaacaagccataaatatgtggctggaaaagcagcagaagttctcaagaaacctttagaaaaattaaaaattatttcttgtcatttaggaaatggggcgagtgtttgtgcgattgaagcagggaaatcagtgaatacttccatgggctttacaccaaatgctggcttgatgatgggaacacgttctggtacaattgacgcgacaatcatcccttatttagttgacgaattaggctatagcttggatgaagtgacacatatgatgtctagtgaatctggcgttcttggtgtatccggaatttctagtgattttagagacatcgaaattgctgcgaatgaaggaaattcgcgtgcattattaacacttcggatgtttactggccaaatctgtaattatatcggggcttacgcttctgccatgaatggttgtgatgcattattatttacggctggagttggtgaaaattcaccattaattcgtaaaatggttacagaacagctgagttatcttggtgtaacatgtaatgtgacaaaaaataatgcaggtgatatgataattagcaatgatgacgaagcggtcaaagtatgcattattccaacaaacgaagaactaatgattgctcgagatgtagaaaaatatacaaaacaaacgataagttaaggagcgatttgatgtgaaaataacgacggcaatgcacggtggcaactataacgaactagcaaaacaacatggattaaccaaagaaatgattctggattttagtgcgaatattaatccacttggcgttccagctagtttgaaacaaacgataacagcgaatttggataaactggtggaatatccagaaccagattacttagcgctccgtgcgcgtattgcctcgtttcatcaacttgacttagcaaatgttattccaggaaacggtgctactgagctgattttcggaatcgcaaaagtaaccaaggcgcaaaaagttctcttacttgcgcctacttttgcggaatatgaacgggctttttttgatgcggaaattatttatgcagaattaacgaaagaaactcattttgctgcagcggaaacggtactagaaatgattaaacgcgaaacagatcttgaagcggtttgtttgtgcaacccgaataatccaaccggacaattaatatcgcagcaagaaatgatccaaattgcagaattatgtgaagaacgaaacatatatttaatcattgatgaggcgtttatggattttttagaaggcaacgaaacaatttcgatgattaattatttagggagctttccacatttagcaattatccgggcattcacaaaattttttgcaattccagggctaagacttggttatttgttgaccaaaaatgatttgctagctgaagcattattacaaatgcgtgaaccttggtctatcaatacttttgccgatatggctggtcaagtattactagatgatacagactacatcactcaaacatacaactggatttcagctgaacgagattttttatatcaagagttgtctaagtttagcgaactaaccgtgtatcgcccaagtgtaaactacatatttttccatcttgaaacaccgcttgacttacgaaaagaattattgttaaaagggatttttatacggagttgcgccaattaccgtggactcactgaaaattattaccgagttgcggtgaaagctagatgtgataataccaagcttataagagcgctcgaggtgatttttagtggaaattaaagcaacttgtcccgcttcatgtggcgaacttttgcaaggatttattactggcggcgaaaaattgatttcatacccaatcaactggtattccgaagtaactttatccgataaatcagggcaaaacagccaaggtcatacaaaagcatggctcgcattcgaggtaacttgcgagtattttggcgtgacaaaaaaagaacgtccacctatatcgttactagtaaaatcgactattccggtcgccaaagggatggcaagctctactgctgatattgccgcaacaataggggctacagcaaaatggttaaataaaccgataacagaaaccgaaattgccaaactttgtttacaactagaaccaacagatagcacgatttttaaatcactcacactttttgatcatttaaaagggtccgtgattgaaagttctaactggatgccgaaactgggcgtcgttgtcctagaaccacttactgttttggaaactgcaacatatcggcaagaagaccaccatgaacaattgctggaaaatgaacaacaattagccaaagctgtgcaatttttcaaccaagcggcagcccaaaaatcaatcaacttgcttggaaaagccgccacagttagcgcagcgagcaatcaaatcattttacccaaaccgttttggaatgagttgttagaagtggtgagttgtttaaatctagtagggatcaatgtgtcgcatagtgggacggtcgttggtttactgtatgagttaggtaagatagacccgctagaaattttattcgaattagaacgacgctatgtcaccactttttacagcaggtattactttagggagctcgttcgaggtggggttcaaataatttcataaagcaaattcttcttgcaagcggattaatttatgctataataactttgataaacgaattcgttcatacaaacagttagatactggaagtctggtgaaaatccagcacggtcccgccactgtaaggagttagacactctaagtcaggtcttttatctaattgttttaactggttatactgcttcgaggcaaagcatgtataattcttggttccagtgtagttgtctcactggggcttttttatttgtttttaaaacaaataagcccactgtaaatggtttggtgccgagaagctggacgaagctacgttttatcaagcaccatacgcacaaagatgtgcaccgcttagttttatggtgggcaatgatcttttcaacgacgaaaagagtgatacaaggaacgtatcttcattgcctatttacaaaaaaagatttgacatttccacgcgtttggtttttaataaagtggacaaataaaatattttacggtacaaaggcgtactgtttacttagcaaagaagctttgagttggaagaggaaatttctctactcaaggcttctttttttagttttaaaaaattaggaggtaatctcatgcaaaaagttagttttaaaacagatctttacattggccaaggagcaacagatcgtttactggattttaaagacaaacaaattttcatcgtaacagatccatttatggtgagctcaggaatgattaatgctattacggaaaaaattgataagtcgaatacatatactatttttagcgatattattcctgacccgccaattgaaaacgttgtagctggaattgaagttttaaacgaatgtgatgccaacttgatgatcgctatcggtggtggttccgcgattgatgcggcgaaagcgatgaaattctttggtcaaaaacttggtacggtgcgcgcaatgccattcatcgtaatcccaactacaagtggaactggttctgaagttactagtttttctgtcattacgaataaagaaaaagcaattaaatatccacttattactgatgctattttgccggatgaagcgattttagatgcggatttagtgaaatctgtcccacctgcaatcacagcagacactggtatggatgtactcacacatgcgctagaagcatacgtttccacaaaagcaaatgattattcggacgcaatggctgaaaaagtaatccaattagtattcacatacttggagcgcgcttataaagacggaaatgatttagaagcacgcgaaaaaatgcataatgcttcttgtttagcaggtatggcatttaatattacctcacttggtttaaaccatggtatcgctcacacagccggtgctaagtttaaaattccacatggtcgtatgaatactttacttttgccacatgttattagttataatgctggattaacaagtgattttggtaacaatccagataaccgtgctgcagaacgttatacagcaattgccaaattactaaaaatgccagcttccaatacaagacttggcgttcgtagcttaattaacgcaattaaacaacttcaaaagaaactcaatatgccaacaacattatctgaatgtggcgttagtcgtaccgatttaaacgagcatattgcgcaaatcgcggaaggtgcgctgaatgatggttgtactgcaactaatccaagaacaccgacagaaacagatgttagtgcgattctcgaaaaaatgttggcttaaaagttatttatttcacaactggaaacaaataacctattgacatcgttttcatgctactttataatagaaccgagcacaaagacgtgtggaataataaatatagcagagcaacggggctccctcaaaaatattgcacaatatttttaaggggctctttctattttctgggagaattttttctctagctctttaactctttcgctcaagtatatgcttctatagagtgatttcgtagagctttgttacgaatcaatcaatagcagaagaagaggacgtgacaggaatgaatggaagaattgtaatagccgatgatgaacctattacaagaatggatatccgagacatattggaagaagcgaactacaatgttgtaggggaagcgacagatggttttgaagcaattgaactttgtaaaagccatcaaccagatcttgttattatggacattcaaatgccactcttagacggtttaaaagcagggaaacggattatttctgaaggccttgctggcggtattattttattaaccgcatttagtgatcccaaaaacactgaaaaagcaaaaggattcggagcattaggttatctagtaaaaccacttgatgaaaaaagtttaatcccaacagttgaaatgagtattgccaaagggcgagaaacaagaaaactagagcagcaattagaaaagctcacaaaaaaattagaagaacgaaaagtgattgaaaaagctaaaggtgtgcttatgattgagaacaacatcacagaggaagaagcctacaacatgattcgtaatctgagcatggataaacgttgtccaatgatggaaatcgcagaaacgattgtgatgagcgatgactaagacgattcgagaaatgtgtttacgctatacggacttggcagaatatgatattgatgaattaatacatactgcaaaatcgttaagcgagtcttccatgtatcaagatgtagatgttttcattgatgtttataacaaacttactagtgaagcacttgttattcatcatacgccgccaaaatcaaccaagtcactttataaaaacaatgtagttggagaaactgctcttcggagtaatgaacctggtgtacttagaacacttgaaacaggtatgaactccaacgacttgcttgccaaaacacaagaaaacgtattaattcgtcaaaaagtgtatcctatccgtaacaaacaacgagtcattgccgtacttattctagaaaatgatattagtgcagaaattaaagctcattttgaaatcgacaatgaagaaacagcctatagggatgtttctacaacactttccgcgatgagtaaattaaccgattctattactgatcaactagatgatgcaatcttgatttttgatcgtaacggtattttacaacaaaaaaactgcgctgctgaccagtattatgaacgactcggctacatggaaaatatccaaggaatgcattatgataatttatctctcgaccagatgatgtttgatgcaattatgtatcaaatcgaaacgggaaaacagccagttcaattaaaaaaagaagtggttattgccgggaattactttattatgaagcaaatttttgtgaaagaagaggatgaacaagaatgtcgttttatccttatcttacatgatgtcacggatattaaagtgaaagaagcggaaatcgtttcaaaatcggtggcaattcgcgaaattcatcatcgtgtgaagaataatctacaatcagttgtttcactgctgagaattcaaggcagacgttctacaagcgtggaagcacagaaggttttgaatgagagtgtcagtcgtatccttgcaattgcagctacacatgaacttttatccaagcagatggaagacggcatcaacttatatatggtaattgaagcagtcgcctataatattgaaagatgttgtaacgattgtccgcaagttgcagttagaatggatattgataaacggatttacttggatagtgaccgaaccgtggcactagcacttgttatgaatgaactactacaaaattcatatgatcatgctttccatccaaatgaatcaggcgaaattttactacaaataaaagaagaaaaaaatattattcacgcagaagtaagcgataatggtcatggctttaatgttcggaaagtatccgaaaaaagcctaggactttccattgtcaaaagttacatcaaagataaactgcgcggtaaagtaacaattgaatcaaatgaacatggaactaaaacaatgttcgattttaaatacaattcaatccatgctacaaagaagtagctatgaaaaaagcgatgaagcttaaagccaagtaacgatactgttatttgtctttaagctttttctttttgctagaaaggagtgagggttttgacggaaacgattttaagtgtagggattgaccttggtacgtcgacaacacaactcattttatccgagttagaaattcaaaatatggcatcaagcttcacagtgccgcgcattgtgatttcagataagcgaatcatttttagaagcgagattctttttacaccgattcttgctgataatttaattgatgtagatgcaattcgtgattttgtaacgaaagaatatgcgaatgctgggattaagaaagaagaaatcggcatgggggcagttattattacaggtgaaacggctcgtaaagataatgcgagtaacgttctagatgcgatgagcggttttgcaggagactttgtcgttgctacagctggacctgatttagaaagtattattgctggaaaaggagcaggtgcgcatacttattctaaagaaaatagtacttgtgttgtgaatctggatataggtggcgggacaacaaatttatcgctatttgatcgcggtgagcttattgatacagcatgccttgatattggtggtcggttaatcaaagtggaccgtgaaacaagaaaaatcacctatattgccccaaaaattcaagctttaatagaaaaacgtggttatccaatcacgctaggtgagaaaacctcgccagaaaatttacaaccaattctaggtgaaatggtagagttacttaaaaacagtgtcggtcttggagctccaaatgatttttacgaaacaatcatcacaaataaaggcttaaaattccttgctgaaattgaatgtatttctttttcaggcggtgtggctgattgtatttcaactggtgctttaagtgatccgtttagatacggagatattggtcttttactcggaaagtcaatagctgaatctagcttgatgaccgaaaaaaagtatatcgaatctgtcgaaaccatacgggcaactgtggtaggagccggttcacacacagcagaaattagtggtagtacaatcacttataccgagaaaattttcccagtaaaaaacattcctattttgaaacttgccaaacaagaagaaaatgaaaatatggcagaagtcatcaaggaaaaactcaactggttcaaaatagatgaagatatggaacggattgcacttgcaattgaaggggagaatagccccagtttccagcaagtaacagaatatgcaaaggccatttgcgaggggatgaaagaaccgatttcacttgggcacccactaattatcattacttggcacgacatggcaaaagcgctcggacaaagtattttcgggcatttaccagccggctatccactgatttgtttggatagtgtcaaagtcgataacggtgattatattgatataggaaaaccagttgctgacgggaaagtgctaccagtagtagtaaaaaccttagtctttaactgatccatataaatagctttaattttgagaggaggatttatcgaatgattttaaaaacgaatttattcggccatacataccagttcaaatccatcactgatgtgttggcaaaagcaaacgaagaaaaatcgggcgaccgtttagccggagttgctgctgaatctgcagaagaacgtgtagctgccaaagtggtgctttctaaaatgacgcttggagatttacgtaataatccggttgtcccatatgaaacagatgaggtaacccgtattattcaagaccaagtaaatgaacgtatccatgattccattaaaaactggacagtggaagaattacgggaatggattttagaccataaaacaacagatgctgacattaaacgtgttgcacgcggcctaacatcagaaattattgctgctgttacaaaattaatgtccaacctagatttaatttatggagcgaaaaaaattcgtgttatcgcacatgcgaacacaacaatcggtcttccaggaactttctccgctagactacaaccaaaccatccaactgatgatcctgatggtatccttgcttctttaatggaaggattaacttacggtattggggatgcggtaatcggacttaacccagtagatgattctactgatagcgttgttcgtttacttaataaatttgaagaatttcgtagtaaatgggatgtgccaacacaaacttgtgtactagcgcacgtgaagactcaaatggaagcaatgcgtcgcggcgctccaactggtcttgtattccaatctatcgcaggttctgaaaaaggaaatacagctttcggttttgacggagcaacgattgaagaagctagacaattagctcttcaaagtggtgctgcaactggaccaaacgttatgtattttgaaacaggacaaggttctgaactttcttctgacgctcatttcggcgtagaccaagtaacaatggaagctcgctgttatggttttgcgaagaaatttgatccattcctagtgaatacagtagttggatttatcggacctgagtatttatacgattccaaacaagtaattcgcgccggcctagaagatcacttcatgggtaaattaactggtatctctatgggctgtgacgtatgttacacaaaccatatgaaagccgaccaaaacgacgtagaaaacttatccgtgcttctaactgcagcaggatgtaactttatcatgggtattcctcatggtgatgacgtaatgcttaactaccaaacaactggttaccatgaaacagctactttacgtgaattatttggtctaaaaccgattaaagaatttgatcagtggatggaaaaaatgggattcagcgaaaatggtaaattaactagccgtgctggagatgcatctattttcctaaaataaggaagggaggaactaagcgatgaacgaacaagaattaaaacaaatgattgaaggcattttaacggaaatgtccggtggtaaaacaaccgatacagtagcagctgcgccaactaaatctgtagttgaaacagttgtaacagaaggtagcatcccggatattactgaagttgacattaaaaaacaattactagtaccagaaccagctgaccgcgaaggctatttgaaaatgaaacaaatgaccccagcaagacttggtttatggcgcgctggtccacgttataaaacagaaacaattcttcgtttccgtgcggaccatgctgttgcacaagattccgtgttctcttatgtttcagaggatttagtcaaagaaatgaacttcatcccagtaaatacgaaatgtcatgataaagacgaatacttaactcgtccagacttaggtcgtgaatttgatgatgaaatggtggaagtgattcgtgcgaatactacgaaaaacgcgaaactacaaatcgttgtcggtgacggacttagttctgcagcaattgaagcaaacatcaaagacatattaccttctattaaacaaggtttgaaaatgtataacttagactttgataatattatttttgtaaaacattgtcgtgtgccatccatggatcaaatcggcgaaatcactggcgctgacgttgtgtgcttacttgtaggcgaacgtccaggtcttgtaactgctgaatctatgagtgcttatattgcttataaaccaacagttggtatgccagaagctcgtcgtactgttatttctaacattcatagcggcggaactccaccagttgaagcaggcgcatatattgctgaattaattcacaatatgcttgagaaaaaatgttctggtattgatttaaaataaaattgttagaggaggaaacttcatgaaaaacgataaattacctgcatccgttttaagcgtcaaagttgtatctaatgtagacaatggtttatttaaacaacttgacttaaaaccgcatcaaagaagtctgggtattattacatctgattgtgatgatgttacatacacagcacttgatgaagcaacaaaagcagcagaagtagatgttgtctatgcgaaaagtatgtatgctggtgctggaaatgcatccacaaaactagctggtgaagtaatcggtattattgccggaccaagcccagctgaagtaaaaagtggcctttcagttgcagtagacttcatcgaaaatggcgctagctttgttagtgcaaatgaagatgatagcgtaccttactttgcacattgtgtatcaagaacaggttctttcctttcaaaagaagcaaatgtagcagaaggacaagcgattgcttacttaatcgcaccgccacttgaagctatgtatgctctagatgcagctcttaaagcagcagacgtagcaattggaactttctacggaccaccatccgaaactaacttcggtggagcacttttaacaggtagtcaatctgcatgtaaagctgcttgtgatgcgttcaaaatggcagtagaaaatgtggctgaaaatccacttcaatattaaggtggtgctaaaaaatgccaaatgaagcacttggtttaattgaagtcactggtttccttggtgctgtggttgccgctgatacttgtttaaaagcagcaaatgttgaattaattagatgtgaagtcattaaaggtggcttaacaacagttgaattaacaggcgatgttggtgctgtaaatgcagcagtggaagcaggaaaagcagctacagaaagcttaggttgcctcatttctagtcacgtgatagcaagaatgagtgaagaaacgaaatcactctttgtaaaagctgagcaagaaatagaagaaacaaaagaagttatccaagaagtcgtagaagtaaaaacaactacagatgaaacggaaaagaaacttcgcgaaatgaaagttattgatttaaggaaacttgcttacacattagataatgtgcctatcccaaaaagcaagattaaatatgcgaacaaggataaacttgttcacgcactaaaagatatttatggaaggagtgaaaactagtggcactagaagataaagatttacgctcaatccaagaagttcgtaacctcattgaatcagctaacaaagcacaaaaagaacttgctgcaatgagccaacaacaaattgatacaattgtaaaagcgattgctgatgccggttatgatgcccgcgaaaaactcgcaaaaatggcacatgaagaaactggttttggaatttggcaagacaaagtaattaaaaacgtcttcgcctccaagcacgtctacaattacatcaaagatatgaaaaccattggtatgttaaaagaagataacgaaaagaaagtaatggaggttgcagttccactaggtgtagttgcaggattaattccatcaacaaaccctacatccactgttatttacaaaacactaatttcgattaaagcaggaaatagtatcgtattttctccacatccaaacgcactaaaagcaattcttgaaacagtaagaatcattagtgaagcagcagaaaaagctggttgtccaaaaggcgctatcagctgtatgactgttccaacaatccaaggaacagatcaactgatgaaacacaaagatacagcagttatccttgcaacaggtggttctgctatggtaaaagccgcttattcatctggaactccagcaattggagttggcccaggtaacggcccagcatttatcgaacgcagcgctaacatccctcgcgcagtaaaacatattcttgattctaaaacattcgataacggaacaatttgcgcatctgagcaatcggtcgttgtggaacgtgtgaataaagaagctgtcattgctgaatttagaaaacaaggagcacacttcttatcagatgcagaagctgttcaacttggtaaattcattttacgtccaaatggatccatgaacccagcaatcgtaggtaaaagcgtgcaacatatcgctaaccttgctggtctaactgttccagctgacgcaagagtacttatcgctgaagaaacaaaagttggcgctaaaatcccttattcaagagaaaaattagcaccaatcttggctttctacacagcggaaacttggcaagaagcttgtgaacttagcatggatattctttatcacgaaggagctggacatactttaatcatccactctgaagataaagaaatcatccgcgaattcgcactgaaaaaaccagtttcccgtctcttagttaatacaccaggagcacttggcggaattggcgcaacaacaaatcttgtacctgctttaacacttggttgtggggcagttggaggaagttcatcatctgataatatcggacctgaaaatctattcaacattcgtcgcattgctactggcgttttagagttagaagatattcgtaaagaagaaaaccaagcaacacctgaactttcggttgatgcagacgcactcatccaaagtttagtagaaaaagttttagcagaattaaaataaaaaataaaacactaattggaggaattttaaaatggcaaacgcaaacgcattaggtatgatcgaaacaaaaggtttagtaggagcagtagaagcagcagacgcaatggtgaaagcagctaacgtaacacttatgggtaaagaacaagttggtggcggtctagtaacagttatggttcgcggtgatgttggcgcagttaaagcagcaacagatgcaggcgcagcagcagctgaacgcgttggtgaattattatctgtacacgtaattccacgtccacacagcgaagtagacgcaattctaccaaaaagcgctgaataagaaaaatttctaacataaatcaggaaaaagcgtgagcgtagggcataagggttccatcagactcggaaaatgcctaaaactttcgctttttaccagatttaagcaagacaaagcttcccatcattactaacaccaattgtaaatgggacaaaaggatgtggttctttggctattttgacagaagatgagttacgaaaagcctacttacacaccgatttaaaaacaaagaaaaaattagatataaaaaaaggaacgattattactccatcagctaagagttttttatctgaaaagaaaatcgaccttcattatattgatgaaatttcagaaacaaaagtagtagtggagccagtgaaaaaagaaactgctagagcaaaattccaaacgatttatggtggttcagtagatgaaaagccagaacatatgacgcatttacgcggcaacttgcttgtatttaaagaccatcctcaaatcgctttccgcggaaaattagatacgcttgaagctgaaatcctggaaacccagtgttctgttgctagtgaatttaaagatcttgcggaagatttacaagaaatcctcacctttgtaagaaatattgtacgatcggaagttttaaacgagcaaatcgaaacggttaatttgcttggaatggacgaaaaagaactgcgggaacgtagtcataatccgaaaaaatactaccaaatgacacattttatgcccgattatacgatggggaatgctgttattcggttaaacaaattaagaacgatggttcgtgaaacggaattaactgcttttgcagcatttaaggaagcggattattcggtaaaaagaccagatattattcaagcgcttaacaggttatccagtttgttttggatactaatgttccgcgtaagaactggtgaatataaaaagtaaggaggcttattcatgaataatgagttaataacaagccttattgaagaagtcactcgccgtgcattacttgaaactggcgtagaagtagaagcatccggtcgtcacgtccatttagatcgtgagacagttgatgcactttttggacctgggtatgaacttactcatttccgtgacctatctcaaccaggtcaatatgtttgtaaagaaagaattagcattgttggaccaaaaagcgtgattcataacgtagtaattcttggaccaatccgtaaaaaaacacaagtagaaattagtgctacagacggtaccgcacttggtattaaagcacctgtccgcgaaagtggagacatagccgggacaccaggaattttacttttatctgctaaaaacagtgttcaattaactgaaggacttattgttgcaaaacgccatattcatatgacgccagaagatgcagcaaaacaacaagtaacacaaagtgaaattgttcaagtgaaaattaatggcgacagaccactgatttttgacgatgtggtcgttcgaattagccctgattttgctacatatatgcatattgattacgacgaagccaacgcatgcggctttaaaaagggaattcgaggtcaaataattaagaaaacaaaggcaaaatgagtatggaaatggaagctctaataaaagccgtcaccgaggaagtcatgagacgattacaacttccagataaaaaaatgattatcatggggcaagattcagaacacactctcagacagtgttatcaaaaagaatatcaagtttcgctttatgatcgttctgaacgtacctgtgacattttattattagaagaaatggaaatcgctgaattagctcgaatcagtttgcttgcaccaatgaataaaaaagaacaatttatcacagatcatcttttagaagaacgtcctacttggatcatgaaaagcggaattaaagcaaatgcttataaacgttctgctaaatatggtatcagacagctccttcaagaatatgaagaaaaactcgctcgttttggcgtagaatatatcgataatccggtgaaaaacgtgaaaacgagcaaagtaattagcgaacaagatgtgattaaactcacgaagaacaaaagcgaattcattttgccagagggaagtttcttaacaccacttgcaaaagattatttacaggaaaaccgaattagcattaaagaaagttaggaaggaagagcggcatgcaaattggaaaagttaccgggagtttatgggcgacaagaaaagatgaaaaactgaatggtttaaaactactactagtagagatttgtaccgatgaagtggaagataaaagacattccatagtggcagctgataatgccggagcaggaaacggtgatctcgtgctcgttacaactggtagcgcagcacgagcatctactggggataatacaataccagtggacgcgtgtatcgtcggcattatcgactcggtagaacgttatggctgaacagtccttaggtattcttgaactcaggagcataagtaaaggttacgaaatggccgatgtttttttaaaagctggcaatgtaactttatttacttttcgtccgacatgtcctggtaaatttttgattattttgcaaggtgcttccggtgaacttactagtgcgatgcaagatgcaaaagaagaagcagggaaatttcatgtttcttcttatattttgcatatggcgcacgaagaattacttgcttttctaaacaataaacaccctaaagttgatgttgatgcagtaggaattatcgaaatcagtcaattgggtgctgggctaaacgcggtgaatgaagcgctaaaaaaatcagctattcatttaaaacgaatgacgctcggtgcttcgattggtgggaaatttgtggctgtttttacaggggaagttagtgctattcaagaagggatgcggattctaatcgaaaccgcagaaccaaaaaaggtgatacatcatacggtcattccttctcctgatgaacttttaaaacgctatctatagaatggaggaacacttttgagcattaatgaaattattatttatttaatggtaatctttatgattctaggagccattgacaaaattatcggtaacaaatttggcttaggagcacaatttgaagaaggtattatggcaatgggatcgctaactctagctatggtcggtattattactttagcaccagttttagcgaaaattttaagcccgattgttgtaccaatttatacagcgcttggggctgacccagcaatgtttgctacaactttacttgcgaatgatatgggtggttttgcgctagctcaagaacttgcgctaacgcctgatgctggtctttttgcaggagctattttaggctcaatgatgggaccaacaattgttttcacgattccagtagcacttggaattattaaaaaagaagaccataaatacctagcgactggtgtactatctggtattattacgattccaatcggttgtttaatcggtggtcttgtagctggattttcaccaatcatgattttcaaaaacttagtaccaattcttcttgtagctgtacttattatgttaggtctttggttcaaaccagaaggcatgattaaaggctttacgattttcggaaaaggggtagtaattgttgctactatcggacttgtggctggagctattcaacaacttactggtttaactattattccaggaattgcaccaattggcgaaggtatcgaaatcgttggtggtatcgcactagttctagcaggagctttctgtttagtttttgttattacgaaagtgttcaacaaaccacttatgaaaatgggtaaattacttggtatgaatgaagttgcagcggctggtatggttgcgacacttgcaaatagtatcccaatgttccaaatgctaaaagatatggatgagcgcggtaaaattattaacgttgcttttgcagtatctgcggcctttgttttaggggatcatctaggtttcacagctggggttgcccaagatatgattttcccgatgattgtcggaaaacttgtcggaggagtaactgcagtagctgtagctatctacatggctaaccgaatgatgaagaaaaataaagcaaaagaacaaacggcggtgaaagataatggctgatattagtaaagaattaattgagcagctagtaaaacaagttgtcctagaaaaaatgggtcaaagttccaaacacgttgacccaagtggtattttatccgttaaacttccagaagtaagagtttctgaagaagaccgtttagatactggtaaccctagtgatgttgtttatacaaaagatttagtaacattagaagaaagtaaacgtctaggttttggtctaatggaaatgaaagatacaacatttgattggttcttagattacgatgaagtagattatattattgaaggcagactagatgttgtcatcgatggtagaaatgtttctgcaggaccaggcgaactgattttcattccaaaaggaagccaaattaagttctctgtaactggagaagcgagattcatttatgttacttatccggctgattggcagtcacaataatcataaaaaaacgatttcggcaacatttgctgaaatcgttttttatttaagtgaatcgcgatattctttaggagtcatatcgaactctttcttaaagactttgcaaaaataactagcacgcgaaaatcctaaattctttgcaatcgtgtggacggcccagtcacttttttctagttgttcctttgcatatagcattttttgttcattgacgtaattaataaaattgatattcaattcgtttttaaataatttacttaaataaaaggggcttaaataaacataattggctacttcttctagagtgatggaacgatgaatgttctttttaatgtagcgaatagcttgtttgatttctttatgttcaccactcgttttactggatgtggcagcttcttttttgggttgtttttgtttttcgtgagcggtgtagtagtcacttaaaacatcaagtacttcgactgtttcgagcgaatgaagtagggcagagtgatctggattttttttgttgaagtcttcttgaatttgttgggtaaattgattttctacctgactattcatcaaaggttgaatatttactactttttctttctccaaaaatcttccctccttattttattcttgcactaattataccataaaatcgcttaaaataacgttttatcctgcattttaaacagaacaataaattcttttttataacaaaatattgtcatttttgctttgtgaattagagaaattgagaaaaagttcacactggtggctattttaagtgtatacaatgaaaaaaatacgattttaaaagcttgcactattttgctttctagcctgttagtgcccttgtaccagtgttttaacagggatataatgagatggaaataacgctttcacgagagggtgatcttttcaattgaagattcaaaaattagtattatgtgcgatgttgattgcaatgtgtgtaattggcgcaaacataaaattaatgggttctgttgcatttgacgcagccccagcttttattgggactttgctgcttggtccgatgtacggtgcagtgcttgggattttcggtcatttaacatcagctttacttgcgggatttccgctgacactaccgattcatttgattgttgctggaatgatgggcgtaacgatgattgcttatggatttacgcgccacaagctagctgaaaagaatcaactagttgctattagtgcttctagtgttgtcgcttttgtttttaattgtccgttatcattacttgcgctttatccattaatgcatcaagcggtatttgtgttatttccggttctagctattggttcgatttgcaacatttttgtcgcagaagtcgtttaccaagtattaccagaacgctggaaaagacgaattgccgggtactaaacaactaaataggtgaatatattaatccgggaaagaggtggaaatcctctacaggccctagctactgtaattcggacgaaagccaaacatatgtcactggaagaaattccgggaagactggtgagtaggttgatgataagtcaggagaccgctagtatattcgatatccaaaaacaacttctaagggagcgagttgtctttattaaacagattttcatgataagaaagtttctttgtgctacatagaattcttattgatgttaaatctctaaaagacgccaaagttctgtttggcgtctttttttatggctaaagcgaaaggtgaaaaaagatgaacaaaatcttaattgcagccgcatcaagtggtgcaggaaaaacaaccgtaaccctcggaattatgcaagctttgaaaaaaagaggcttcgcggttcagccatttaaagtaggtccagattatattgatacgaactatcatcaagcaattacaggtgttgcttccattaatttagatagttttctcattgatgatgacgagatgctagcgtccctttttcaaaagcacggcgagtctgctgatatttcggtcattgaaggagtgatgggattatttgatgggcttgggactgatcgcgataatgccagtacttcctttattgccaaatgcacaaagacaccagtcattttagttgtggatggaaaagctatttcgacttcagcagcggcgattgttgacggattcaatcgttttgatccggaacttaaaattgctggcgtcattattaatcgagttgcctcagaaaaccatttttctttaatcaaaggggcgattgagcgttatacggatgtaccagtgttaggttacttgccaaaaaatgcggcagtggcacttccagaacggcatctaggattagtaccacaagaagaaatgactgagctcgaagcaaaatgggagctactttctgacctcattaccacgcatgtggatttagacaaattactcgaaataagcaaatctagtgagaacttatctacttctaaagcgcaaatgaaagtagcagatttttctgggcttcgtgtcgcttatgcgctagatgcagcatttcacttttattatcaagataacttggatctgattcgtttgactggggcagagttaattccatttagcccgcttgaggataacgaggttccggaagcagatttcatctatattggcggcggttttccagaaatttttgccaagcagcttaatgacaacagatctatgcggaagtcaattttggctgcgcacgaaaagggcattccaatttacgccgaatgtggtgggttgatgtaccttggttcgagtttagaaatggaaggaaaacagtatgaaatggtgggagtttttaacggtattagtaagatgacaacaaggctgcggaagtttggctactgtatcgcggaacctttagaagaaacgttaatcggcaaaaaagggatgtcgattcgcgggcatgaatttcatcattctgtttttgaaacgactgaaacagcttgtatgaaactttcaaaaaaacgtgacggtgaaatagttaaagagtggcgtggtggttatcaaaaaggcaatacttttgccagttatctccatatccacttctaccaaaatccggccattttaatgcagatgtttggagctggaaagagatgagcgtactcttttataccatatcgtttattttagatttcatactaggtgacccttacagctggcctcatcctatcaaggtaattggtaactttattcaattattaacgaacgctttgcggaaaatttttcatggtaaatcactgtattttgctggaggcctattattcattcttacagttggaatgacgggaattgtttcgtggctcatcctttatattagtgcaaaaattgctttttggctttatgcggcggtgtttatttacttagggtatacgacacttgcgatgacttgccttgcgaaggaggcgcggaaaattcagcgaacactcgcggatggtgatttagaagcggctagagtacaagttgggatgatagttggtcgggatacagacaagcttacggcagaacaaatcagtaaagccaccattgaaaccgtggcggaaaacacagcagatggcgttatagcaccattattttacttattcattggaggacctgtgctagccttgatgtataaagccgtgaacacacttgattcgatggtcggttataaaaatgaaaaatatcgcgccattggttttgtttccgcaaaaatggatgatttggccaatttcattccagcaaggctatcttggtttttccttgtgattgcgagttttattttgaagtatgatggacgcactgcatggcggatagggcttcgtgaccggaaaaatcatacaagtcccaattgcgcatatccagaaggcgcggtagcaggagcgcttgggataacacttggtggcacccatgaatatttcggcgagacagttgttaaaccaaccatcggcagtggaacaaaagccgttacacaaaaagaaatcagtcaaacaattcacttactatacacagcttccattattgcttttctaatttttatcagtatacatttaatactattttaaaggagtggcacaatgaactacattaaaaatccagccaaaattgaagagaaaagttttgaaatcattcaacaaattattgacgatattcgaccagattatacatttcaaaacaaactagaggaagccattatcaaacgtgcgatacatacgacagcagattttgattacttggatagcctcgtttttcaacaagatgttatccaaaaaattattcatgttcttaaaaataaaggaaccatttttacagatactaatatggcgcttagtggtattaataaacggctgttagatgaacttggctgtagttatcactgttatgtgagtgatccagaaacgatcgaaattgccaaacagcatggcatcacgcgctcaatggccggaattaaacttgcttctttaaaagatggaccgaaaatatttgtcctagggaacgcgccaactgcggtttataaaattatcgaaatgacggaaagcgggcaattacaagcagaggcggtcgttgcagtgcctgtcggatttgtcggggcagctgaatgtaaagaagaaattcttgaaaccgacattccagcaattgtcgctcgtggtagaaaaggcggtagtaaccttgccgcggcaatcattaatgcaatcttgattacgatgtaaagaaggcgacgagcagtggaagattttatttattataatggcaaaaaatatcgtaaaggctatacaactggaacgtgtgcagctgccgcggctaaagcgtgtgtcgaaatgatagaaaaccaagaagaagtaagcgcggttaaagtcacaacaacaggtggaactattcttgaaatccccgttgcctatcaacagttttctgaaaaaaaggcaactgcagctgttcaaaaagatggcggggatgatattgatgccacacacggcatgtggatttttgttgatgtcgaattaacagatagtccggaagttactttagatggaggcgttggaattggtcgcgcaacacaaaagggtatttcggttgaagtgggtgaagcggcaattaatccggcaccaaggaaaaatattttagctacagtacgcgaatcacttggcgaaaatcgtggcgcaaccattttagtatatgctcctgaaggggaagaacgcgcgaaacgaacaatgaatagcaacctcggtattatcggcgggatttccattttaggaacgacaggtattgtcacaccgatgtcggatgaaggctggaaaaaatcattatcaatggagctcgaaatgaaacggaaccaaggacttgaccaaattattcttgttccaggtaattacggcgatgattttgttcaaaatacgcttggttttgcgagtgataacatcgtttccatgagtaatttcgttggttacatgttgaaagaaacccaacgactcgcatttaagaaagtattgatggttgggcattttggcaaattagtgaaggtttcagctggtatttttacgacctatagcaaggatgcggatgcgcgggcagaaatcttggtggctaacttggctttactcggcgcaccattatcacttttacaagaagtagagaagtgtaatacgacagaggctgcaggcgaattaattgaagcagctggttttactcaagtttatgaggtaatcgcacaaaaaatcaaagcaaggtcagaacgcttcttgaaattcactaagccaagtgtggaaattgatgtcgttacattttcaactgaaagaggcttacttgctgcaacgaaagacatagaagtattgcgggaggaatggcgatgattacagtggttggaatcggaccaggagatacgaatttgctaataaacgcagcaagacaagctttatcttcagcagattcagtgtatggatcgaaaagacaattacaagaaatagctgaattaacaactgcaacgtgcctattgttaccgaaaaaattagcagatttaaaaaatattcctcatcaaaataaaaacgtcgtgattttagcatcaggcgatccactgctctacgggattggcaactgggcgatgacgaatttttcagaagatattcatattatcccgggaatcagtgcaatccagatgatgtttcaccaaatcaagctgccgatgaatgattgttttataacgagcagccatggtaaaacaccaaatttcgattttttgctccaacatgaaaaagtcgcaatggtaacagattccattattggaccatacgaaatagctgctgaaatctcaaaacgaaatctaaaaaaaatcatgtttatcggtgaaaatttaagttcaacagaagaacgaattcataagctaagaccagaggaagttgaaaaaaaatacgatatgaatgttgtggtgattgtcgatgaaagatgacgtatttattcgcggaaaagttccgatgacaaaaagcgaagtgagagcaataagtattgatttactcggattagataatacaagtaaaaaactgctagatgttggcgctggaactggaagcgttggacttcaagtagcttataattttccacatatcaaagttactgcaattgaacgaaataaagatgcggtggacttaattaaacaaaaccaagccaaattcggcgtagaaaatgttgcagtcatcgaagcatatgcaccaatcgaattatctcaggaagagaaatttgatgccatttttattggtggtagtggtgggaatttaaccgatattatcgactggtcgttggttcatttgaaactaggcggtcgcttggtacttaattttattttattagaaaatgccttacaagcaatgaaccatttagaaaaattaccagtgagtgaattgacaatgaagcaaattcaagtttcaaattggcataaactcggagctggacattattttgaaccacagaacccaaccgtcattattggctgtaaaaaactagaggagtgaagaaaatggcagaagtacatttcgtcggagcaggaccaggagataaagaattaatcacactaaaaggataccaattattaaaaaacgccgatgttgttatatacgctggctcacttgtaaatccggaattgctagaatactgtaaaccggactgcgaaatccataatagtgccagtatgaatttaatagaaattattgactgtatggaagcgggagtaacagctggaaaagaagttgttcgtctgcaaacaggagacttctctatttacggctcgatccgtgaacaagtggaggaaatgaaaaaacgttcgattccatttacatgtacgccaggtgtaagttcatttcttggcgcggctagcagttttggtgttgaatatacggttcccgaagttagccagagtgtgattattactcgaatggctggaagaacgccggtaccgtcacgtgagtcactcagatcttacgcagcgcaccaaacgtccatggttattttcttatctgttcaaggtatcagaaaagtagtctcagaacttatcaaaggtggctataaaccagaaaccccagcagctgttatttataaagcaacttgggcagaagagaaaaaagtaactggtacgcttcaagacatcgctgaaaaagtgacagaagcaggaattactaaaacggccctaataatggttggtgattttctcggcgaagaattttattattctaaactatatgataaggatttcaaacatgaatacagataaaattgccattatcgcagttactgaacgagggcgcgatttagcaatttcattaacaaaaacattaccaggaacggtctttgtcccagaaaagcaccagaatgaacagactgcagttttaacgcctaattttggtacagcaatgcgtgaaatgttcacgacgcatcaggcattaatttgtattatggcaacaggtattgcggtgcggacgcttgctccagtcattcaagataaactatcggatccggcagtaattgtaatggatgaatatggtcagtttattattagtttactctcaggacatgttggaggagcaaatgagttaacggagcaaattgctgcaattactggtggtgccgcagtaattacaaccgctactgatcgtgcaaatgtggcagcaattgataatatcgccaaagaaatcgacggatatttacccgattttaaagcgacgactaaacgcattaatggcttgctcgctgctggaaaagaagtcagtttgcacgtagatgagccatttgaagtagattcacgaggttttacaaacaaagaaattagtccacaaattttcatttcgaccaaatacaatttaccagatacaaaaatagaaagaattcagctagtaccaaggaagttcgtgcttggtattggatgtcgaaaaggcgtttcagcggaaacaatggaggaagttttcacccatttttgtgaacaagaaaacatacatccgcgcgcttttcgtgaaatccatagcattacattgaaagcagaagaaccagccattttgcaattagcgaaaaagtggaacattcattttattgttcattccgcagaagaattacaaacggtagctgaaaaatatccaacgtcagaatttgttctaaaaaccgtaaaagttggaaatgtcgctttatcatcagcagatattggtagtaatggaaacgtcattacgaaacgatttgccgaaaatggcgtgacattcgcagcaggaaaactaattaaaaataatgaggtggcaaaatgatttatgtaatcggaattggcccaggagataaacgattaatgacaggtgaagcactagaagcaatagcggacgcagatgtaatcgttggctatgtaacatatatcaaactaatcaaagaattaattaaagataaagaagtagtgaaaacggggatgcgccgtgaaatcgatcgctgccaggaagctgtaaatatcgcattaacaggaaaaaaagtagccgtcgtttcaagcggagatgctggtatatacggaatggctggattggttttagaactagccgaaaaaagcaacccagagctagaagttaaagtaatcccaggaattacagctagtataggggcagcagccgttctcggggcgccaattatgcacgatttttgccatattagcttaagtgatttaatgacaccatgggaagtaatcgaaaaacgtttaacacatgctgcgatggccgatttcgttgtctgtttttacaacccgagaagtaaaggtcgcgccaatcatttagccaatgcttttcaaaagatgatggaacacaaatcaccaaagactgtcgttggaattgttaaagatgtcggtcgaaaagaagaacgaaaaatcattacgacaatggaagatattgactatgagttagtggatatgacaacgatggttattgtcggtaacaaagaaacatacgtaaaaaacggcaaaatgattacacctagaggatactctttatgatttttgtgcttggaggaacttctgatagcttgttaattagtgactggctaacggaaacaaaacgaccatttattctttcagtagcaacagattacggtgaaactttagctaagcaacatgcagaaaaagtattttgcggtcgattagccaaagaagcaatgctcgcaaaatggcagttagagcaaatcaagcttgttattgatgccactcatccctttgcaaccatcgtttctgaaacggccatggaagcatgcaaagaagcgggcattccatacatccgctttgagcgaacaagcgaacaaaccgataatacttatttagtagatgatattaacgaagcatgtaaagttgctgcaaaacttggtcaacgaatttttcttacaacaggtagtaaaaatttacctgaatttgtggcagggctgaaacaacaacatattatcgctcgtattttgccagtgtctgatgtgattcgttcagcagaagaacttgggctcgttgccgaccaaataattggcatgaaaggtccgttcactaaagaagccaaccgcacacagctagaaatgacacaagcggacgtattaattactaaagaaagtggaaaacaaggcggatttcaagaaaaactcacggcagcagcagaattaaatattcctgttatcgttattcgccgaaaaaaattaaattatccaatcgaaataaatcatttaaccgaactaccagaaattttaactcaattggaggtctactaatgggaaaagtcatgttaattggcgcaggtcctggtgatgcacaacttctaacagtaaaaggattagccgcacttcaaaaagcggatgttatagtctatgatcgcctcgttgaaccagcgatgctccaagaacgaaaagctagttgtaaactaatttatgtcggaaaagaaccacttcatcatccaatcccgcaagatgaaatcgaacaaattcttgtaagagaagcagcaacaaatgagctagttgttcgtttaaaagcgggtgatccgtacgtatttgggcgcggcggcgaggaaggcgaaacacttcataaagcaggtattccttttgaagtcatcccaggaattacttcagctattggcgggcttgcttatgcgggaattccggtcacgcaccgtgattttgcttctagttttcatgtgattacaggtcacttgaaaaaaaggcgcgatccactagattgggaagcacttgcaagactcgaaggaacccttgtttttctgatgggaatgacaaacttacctaacatttgcgccaatctactagcaaatggacaaaaaccggagacaggcgtggcaattgtacagtgggcatcgcgtggtaagcaattaaccgttacaggaactttgcaaacaatcgaacaaaaagtagcagaatctggtatttcatctcctgcgcttatcgtagttggtgatgtagtgagcttacgtccacagcttaacttttttgaagaaatgccacttttccatacaaaagtattacttccaagagcacgcgcaggtaaaagtatgctcgctgaaaaaattcgcgatttaggcggagaagtaacgatgtatccaaatattcaagtgctggatattctgccaacgaaaacaaaagcagaattatgtgaaactagcgaacttcttttcacttcaaaagaggctgtagagcgctttttcgattatctagcaacacttgagttggatattcgttccctaaaaaatacccatcttaccgctatcggaaaacaaacgaaagaagcatttagtgaaaaaggaatcattccagatagttttattaaaagacggagcacagaactaattttagagcatatagctcgttttcaaaaaaatgctagcaacttaattatcggtagtgttgttgatacagcagaggttagtgctatcttatctgaagtgaaaacaaccgaaatgatgccattgtacgatatgcgtccagtgacagagcgcccatttgacctcgaaagttttgaacaaatatgcttttccagttctcgttcagtccaaaatctactcgatgtactaacaaccgaagaaaaagcgattttacaaacgaaaacgattctctcgataggaagattcacgagcgcaaccttgcagtcatttggcattaatgaatttgaagaagctgagaatgctacaccagagagcttaattgaactaattcaaaaaacaaaattagaaggagtaccacaatgaaaaaagccatattagtcgttagttttggcactagttatccagaaaccagagaaaaaaccattgaagcttgtgaaaaaagagtggcccaagaatttcctgagtacactgtatttcgtgcttttacatccaacaaaattattaaaaaactaaaaacccgtgataacatgcacattaacacaccaagtcaggctttaaaccagctaaaagaactaggttacaaagaagtctttattcaatctctacatattattaatggcggtgaatttgaaaaaattacagctcaagtggaaaaatttaaagcggattttgattcaatcatcattagtcaaccattacttgattcaaaagaagattacgaaaaagccattgaagccattcgccaccaaatgcctcctttgaaagaaaatgaagcattgattctgatgggccacggctccaaacaccatgctttcagcgcatatgcttgcttagaccacatgcttttaaacgaaccgatttatctttgtgccgtagaaagttatcccggccttgatcaagtgattgaacgattaaaacaggcaaagatcaaaaaagcccatttgatgccgttcatgcttgttgcaggagatcatgccacaaatgatatggcttcagatgacgaagattcttggaagagcatattggagcaagctggtattgaaactgagtgccacttgcaagggctaggcgaaaacccacttattcaagctcaatttatcgatcatatcaaagtagcaacagaaagggtgaacacgcgtggctaaattttacggcattggcacaggtccaggtgacagcaagctagttacgatggaagctgctgatagactggggaaattagcgattctctatactccccaatctaaaaaaggtggagaaagtttagcaaaaaaaatcgttaacccatatttaaaaaacacgcttatcatcaaagaacgtcattttccaatgagttacaacaaaacagagaaaatgcaagcttggaaagaaattgctgaagaaatcaaaacagatgttcaaaacggacatgatgttggtttcattacccttggcgatccaatggtctatagcacttatagttatttgctagaacttttaaaaggtgaaattgaaacagttacactcgcagggatttcatcattttcaaatatcgcctctaaattagaactgcctcttgtaatggacgaggatagttttgctgtaatccctgtaacagcaggagctgaaaaaatcgaacaagcgctcacattatttgacactattgtcttaatgaaagcagcaagcaatttaccccttcttacgacattactaaaaaaactgaatttgcttgatgcagctgttgtagtaagtgatgttgccatggcgactgaaaaaatcacttacggcatgggcgagataaatccagaagaaaaaatgtcatattttactacgattatcgtgaaaaaaagaagggagcaatataaatgaaaaaattatggaagtttctaccatttgttttaatcggcgttatttattttactttaacgaacccagaatccgcacatgcaatgcatatcatggagggctttttacccgttaaatgggcagtcttttggctaattgtctttatcccattccttgtacttggtttaattcgtattcgtaaattaatcgctttagataaaaataataaattactgttggcattatgtgcagcctttatctttgttctttctgcacttaaaatcccgtccgttacaggatcttgttctcatccgacaggtgttggacttgcaacggttatgttcggaccgctcgttgtcagtgttcttggcgtgattgtcttacttttccaagcgctacttcttgcacacggcggtattactactcttggtgcaaacgcaatgtcgatggctgttatcggtccaatggttggttttgtcgtctataaactagctcgtaaactaaactgtaataaaagtgtttcgattttcttatgtgcaatgacagctgacctggcaacctacttaaccaccagcgtccagctcggagtcgttttcccagatccagcatcaggcatgatggcttctattctaaaattcatggcaattttctgtgtcactcaagttccaatcgcgattgcagaaggcttactcactgtagttatgtacaatcttattagcaaaaatttaccagaaaaggtggcacaattacgatgaaaaaaatcaatattaatatcattttaattttattagtagttttgttaatggtgagcccgtttttcttcaataaaacaggtgagtacgggggatcagacggagaagctgaagcagaaatcactaaaatcgatccaagctatgaaccgtggtttgaacctctttatgaaccaaaaagtggcgaaattgaaagcttattatttaccctgcaaggttgcatcggaacaggaatcattgcgtatgtcattggtgtaagtcgtggcaagcggaaagctgagaacgatgttaaccattgataaatatgcttatcaaaaccggtggatagctttttcgccatcattaaaagcattattttatgtcgcgattctaatactcgcgctaactggccctgtgctcgtacaagcgatactatttttatgcatggtgccactgacgctttatgttgttaaaatccactttaaacaatatttgaaatggctccttttaccattttcatttctactatttagtttgctttcgattcttatttcaatttcaaaagatccaagtagttttcttgcttcaatctctattggaagtttttatcttggtatttctgatgtgacgataacgacagcaactcaagttttttttcggagtattgcttgcttagcggcaacatactttttcgtcttaaccgttcccgtggtacaattaacgaaagtgatgaagcaaatttttattccaaaagtgcttattgaactaacgattttaatttatcggttcatctttattttcttagaagaagcggcggcgattcgaaaagcgcagagcctacgtttcggttaccacggcataaaaaatagctatcgttcatttggaatgctcgtaaatactttatttaatcgcgtaatgaaaagatataatgaaatggttataacacttgatgtgaagctatatcaaggagaatttcatatctaggaggaagccaatttgcttaaaacagaacatatttcattccaatacgaagatggcaaacaagccttaacggatgtttcaatcgatttagataaaggcaatattattggccttattggtgcgaatggctccgggaaatcgaccctttttatgcagcttttaggcattaataggccaacttcagggacagtttattttgaaggaaaaccacttgcttacaataaaaaagccttatttgcattgcgaaaaaaagtaagtattgttttccaagaccccgaccaacaaattttctattccaatgtacgtgatgacgtggcttttgcacttagaaacctaggtattagtgaaaaggaagtggagtcacgagtaacaaatgtactagaaacagttggtgcgacagaatttcaacataaacctgtccaatacttaagttatggtcaaaaaaaacgtgtcgctattgccggagcgcttgttcttgatacagattggttgctgcttgatgaaccaactgcaggacttgatccgattggtaaaaaaattatgatggaaattatcgaacgtcttgcaaaacaaggaaaaaagattctcatttcaagtcatgacatcgatttgatttatgagatttgcgattatgtctatatgttaaaagacggaacagttttaacaagcggggagacgagcgaggttttcttagagaaaagtcatatcgaacaagcagggttagtacagccgtggctaatcaaattacaccaacaagctggctacccacttttcaaaaaagaagccgattttttcgcacatacggggaaggtgattaattaatggtagagcaaataatgattcaaggtaccgcttccgatgcagggaaaagtgtaatagttgcaggtttatgccgcttatttaaaaataaaggcaagcgagttgtgccttttaaatcgcaaaacatgtcactcaattcttttattaccgcaacaggtgatgaaatgggacgtgcgcaagttttccaagctgaagcagcaggggtttttccagatgttcgaatgaatcccgtgttacttaaaccgaccaatgatcgtcagtcgcaagtaatttttatgggagcgattttagataatatggatgctgtttcttatcacgattttaagcaaacacttatcccaaaaattcaggcagtttatcagagtttagctgatgaaaatgatattattgtattagaaggcgctggaagcccagccgaaatcaatttgaatgaccgagatattgtcaatatgggtatggctaaaatggtcgacgcacctgtcgtgttagttgctgatattgataaaggcggcgtgtttgcttcgatttatggcacgattatgcttttaaaagaagaagaacgtgcgcggcttaaaggagtaatcatcaataaatttcgcggtgatgtagcacttttacaaccaggcattgagatgatagaagagctgacaaacgttcctgtcattggcgttatcccttatgctaacctacaactagaagaagaagatagtgtttcactcagcgggaaaaattacgttctagatagttcggcgttacttgatattgccattatttgcttgcctcgaatttctaattttacagactttcatattctagaaattcaacctgacatcagtgtgcgttatatacgaaatttagctgattttggaaatccagatttagtcattattcctggcagtaaaaatacgctggaagatatggcttttctcgaacaatcaggcctgaaaaaagcgattcaaaactatgccgaaaatgccgggaaagtaattgggatttgcggtggctaccaaatgctcggtaaaagaatgcttgacccaaatcaagtagaaagcgaaaaagtagaaattgcgggacttggcttattagatactgaaacaatctttctcgaccaaaaacgcactacacaaattactggcgtgacattttcttcggaaccagtcgaaggatacgaaatccatatgggccaaactaagcgcggcgagaatactcaaccgttttgtaaaattaaagcagtcaacggtaaccaagaaacacacgaggacggtgccatctccgcgaacaaaaacattatcggcacatacatccacggtattttcgataatgatattttcttaggcaatctattcaatgaactgctaacacaaaaaaacaaatccatttatccacatgaaattatcaaactaaaagaacataaagaaactgaatatgataaactagcggctcttttagaagcaaatattcaaatggatcaactagaaaaaattatgaaaggagaaaaaatatgcgtatctacacaaaaaccggcgataaaggaatgacaagaattatcggggggagcaaagtaagtaaagataatatacgaattaatgcatatggtacactcgacgaactcaattcgcttatcggttacaccattacaactcttggaaatgaacccgaaattcaagctgaacttgagcaaatccaacaacaattattcgatgcaggaggcgacctcgcaacagaagaagggaagcgcgattataaactgacagctgagccagttgcttggctagaagaccgcattgatatttatgccgatgaaccacctgaaattgaaaaattcattttgccaggaggtactcaagcagcttctttacttcatatggctagaacagtggcaaggagagcagaacgagaaattgttggtatgctaaaaatcgcctccactaaccaagaagtattaaaatatgtaaatcgcttatctgattactttttcgctgttgccagagtcgtgaattatcgcgcaggcgaaaccgatattttctacaaaaattccgaattagtttttcgaaataaaaagaaataacaaaaaacctctccagacattccatccggagaggttttctttattaaaagcgttgaattaaaaatacaccaataagcattaataaaacaccaatcattcgataacggttaattggatgaggaataaccccgaaaaaaccaaaatgatcaataataagtgcaataatcatttgcccacaaagtgctaaaactactgtcatagcagagccaagtaatggtaaaagtaaaatgttagaagttacaaataatactccaagtgcgccaccagtgaatacccaccaaggaattcgaccgaccccttttagctgaaaagtcaaacgacgctccacaattaaacaaacaagcgtaagtagcgtggtcccaactaaaaaggaaataaatgatgctacaaaaggagaaccgacagtgagccgaagttggctattaatcgatgtttgaatcggtgaaagtagtccagaaacaagtcccattgccataaatagtaataatgatttggatgatctttttgtcatgatttctcctccttttaaaatcgttgcatcaagtaaatgccgccgaacattaaaataacaccaagcagtcgttcgatgttaatctcatgcatcggaacttgaaataaaccaaagttatcaattacaatagccataatcatttgtccacacaccgtaatcattacaagcaacgcagagccaagtcgtggtaaaagtaaaatattagctgttaagaaaataacgcctaatgttccaccgccaacccatatataccaaggatttgaggcaatcatttctgaagatattggccatgatttttgtgtaaataaacaaacaataagtaaaacagtcgtccctaccataaaagaaacccacgaagctaaaaacggtgatttcgtatatgtactaagtcgtgtattgatggctgtttgaacgggtaataccatccccgccagtagacctgatacaataaataatataatcaaaaatttccctcccttttatcacaatgaaataattataaaataaaagaggggtaaaaagatagtatttaatttaaagtgaggtgtttttatgaaaatccgaataatcggatctgttggaagcggcaaaaccactttagcaaaaaaagtttccaagtggctacaaatagatttttttgaaacagaccgaattgtatggaaaagagaagaaacggaagtgagacgaagcgattcagaaaaaatagccgagttaaatgcaattctccagaaggataactggattatcgaaggcgtgcatttagaagcctggacagaagagagcatttcacaagccgacattattatttaccttgatttacctaaaaaacaaatccgctctcagcttataaaacgccaattcaaacaattactacgaatcgaaaaagcgcactacgtagtccgattcagcatgctaaagaaaatgttttactgggatgatttatttgatcaaaggactaaaccattagtgaacgaaaaaataaatcaacatccagctaaatggttaattattaaagaaaatctagcgtttcatgaaattcaacaaaaaatattgcaaattatatcgagccgtgatatattatgagtatcaaatacatcgaggtgcgatataattatggatgaaaaactacgaaaaacctatcttcccatgactgaaactgccttttacatattactttcgctagttaaaccgaagcacggttacgcgataattgaaaatgttgcccaaatgaccaatgagcggattaaacttggaccaggaactatttacggtagtttatccaaaatgaacaaagacaatttaatccaaatcatccaagaggagagcaaccgaaaaatctatcaaatcacagaaatcggtgccgaggttttgcagttagaaaaaacacgcatagaagaattgtatagaaattcgagggaggtttaatcatggagaaaaaagtcttaaagttttttactgtagataatatggaaaaagaagaagcctatttaaacgatatggctcaaaaaggctggttatttaaagaatataaatcttttaggtaccattttgaaaaaggggaaccgaacaaatatcgctatgccattgattataaagtgaatcaaggcgacgaagcctcgtataaagcactctttgctgatgctggttgggataatgtattctgctatccagtattaaacggtaattggatgtatttccgaaaactacaggccgaagaggcaggaagtgaaacgatattctcagatgaagtatcatatattcatttatatagaagtattcggaaacgctggacgatttttggcatattaatgagtattcttttattgctggatttatttttcctaaacaatgctggaagttatcaagtaattactattttcatttttattctatttattattctcatcggtttgtacggaaagatgtttatccaattaacgaggaaaataaataaatttgcgaacaaaaatctataaaacagaatgtaagataattatgatggcgtcaactaaactattttataatagaagaaactcgcatttttttaaaatcatcccatttaatcctgaacttatatgactaaatgatggcaaatgttacaaaatgaagaacaaatgttatcaaataaaattaaattgaatctataactaactttttgccttatcataaaatgttaaagatttcttaaaagacatttagatggattgcaattgtgttcaaattaacgtattctaaaagcatcaagggattcggagacagaaaggcgtgacgacatctgaagtatagaaaattatccaaaaagaaaaaacaaaaaaggctaattgggatagcagggattttactgctgattattctagtaggtgtcatagcatctgtagtcagacaacaatatttaattatgacagcaccgaaaccggacccagcattccattcaaaagagcagaactttcttaatgaactctctcctcgtgcacaagaaattcaagcagaacacggcattttaacgagtattactttagcacaagctatccttgaatctaactggggtcaaagcgatttagcgcaacaaggtaataatttgtttggtgtaaaaggcaaagctccacaaccgatggtaaacatgacgacaaaagaatttgtagacggaaaatggattgaaatcaaagccaacttccgaaaatacaaagattggaatgaatcattagaagcacacgcagaactctttttaaaaggaacttcctggaataaagataaatataatggcgtgatcaaagccgatgattataaaaaagctgcagaagaattacaaacagcaggctatgcaaccgatccaggttatgcagagaagttaatcaatattatcgaaaaatatgacttagctttatatgatcgtatagatgataagatatactatgatgcaaaatcaactggttatggcaacgtaaaaaaagacgtttctggagcaatttggacaaggccttatggactatctggagcacaaaaagtagaagaaattaactactacaaacgagaagatttgaaacttttacgagaagcaaagacagatagtggcgtttggtatcaaatttccgtgaaaaatgatccaattggttgggtaaaacaagaattaattgataaaaaataagaaataaccgaaaaagagctaaaatgacttgtcttatttataggcaaaaagtccttttgaagctctttttcttttttattttcataacagccatctcccgaaaaggttactatacaatagctaagggccttttgtaacataagtaatgtaaaagtaatgtgtattacaaagaagttttgttagaatgaagtggttgttttaaagaacacacgtttctggttttgataagccagaaagatatttcaaagaaggatgtgcaataaatcattatgttacaactcgcaaagaagcatttggtgacaattggtcttggaattacaattacattatgtgcagtaccaatacactcccaagctgctggtctagaggacggcttaacttccaagcaagagaggtttattaatgaaattgcgccgcatgctcaaaaagtgcaaagagaacatggtattttagcaagtatcactatttcgcaagctatactagaatccaattggggagaaagtatgctagcaaaagatggcaataatttatttggaatcaaaggttcttataatggagcctctattaaattaccaaccaaagaacacaacggtcttgtttgggttggtaccgatgctaatttccgcgcatacccgggttggtatgaatcgatgaatgaccacgcacttttatttgtcaatggcccatcatggaaccctcatttatacgggggcttaatcaaagaatataactttgaaaaagcggctattgcacttggaaaaactggctattcgtctgatccagagtatgcagcaaaattaatcgacctaattaaaaaagcaaatttagataaatatgatacagtttatagcgaacgagtatctgataaagcaattaaagctgctggtgaagtagctataaaagataattcctttatttggtccgcgccaggtggaacaaaaggagcaaatccagtcgaaaaaacaaccaaatattttggacatcaagtttctattaatagagaagttaaagtaacggattccaatatttcgtggtatcacattcatcataatggcgattctatcggttggattgaaagcacctctataaaaaaattctatcaattagaagattatgctccaacgcgcgacgctttacttaaaacagatgatcaaaatcgtttagtaattaatatggatattgatacatcagaactgcacaaacctacaatagctaaggaagaaacaaagggcaaaactgcacttaatctacctttattaaacgttcagtcaattgcttggtaagtaaaacgcaaaaaaagtcgaatagctgtttcggctttttttgcgttttcaaaggaattttagagagaaactgttataatgtaaaaggagtttataaggagggttatttatatggatgaacaattaaagatgttaaaagcactaacggatgcaaaaggtattcccggtaacgaacgtgcggttagaaacgtatttcgtgaatatattgaaccgttagctgatagttttgaaacagacggcttaggtagcgccgttgcgaaaaaagtgggcgcagaagatggaccaaaaatcatgattgctggtcatttagatgaagttggctttatggtgactcaaatcgatgataaaggttttattaaatttcaaacagtgggcggttgggtttcgcaagtaatgcttgcacaaaaagtaacaatcgtgacgcgttctggcgaagaaatcaccggtgttattggctctaaaccaccgcatgtaatgacagcagcagaacgtcaaaaatcttttgatattaaagatatgtttattgacgttggtgcggttgataaagcagaagttgaaagttacggcattcgtcctggtgatatgattgtgccagcatttgattttaccgtaatgaaaaacgagaaattcttacttgcaaaagcttgggataatcgtattggccttgctattgctatcgaagtacttaaaaacttacaaaaagaagcacacccaaatatcgtttacggtgttggaacagtccaagaagaggttggtttacgtggagccaaaacagcagcacatttcgttcaacctgatataggttttgctgttgatgttggtatcgctggggatactcctggtgtaactgacaaagaagcaatgagtaaaatgggggaaggtccacaaatcgttatctatgatgcttccatggtagcacatgctggccttcgtgattttgtaacggacgtagcagacgaactatctatcccttaccaatttgaagcaatcccaatgggcggaacagattcagggtctattcatttaacaggaaacggaatcccgtcgttatccattacaatcgcaactcgctatattcattcccattcgtccatgctacatcgtgatgattttgaaaatgcagtaaaactaattactgaagtagttaaacgtttagataaagaaaaagtaacagaaattcgcctaggttgagtttcgagaaaagaggacaacttttatggaacagattcaatcagtaaaaaacgaccgtgtcaaaacatggaagaaactacaaacgagaaaaggccgcgataaaaccggaacttatttggtggaaggctttcatttagtggaagaagcgttacgtcaagatggtttagtactggagctgcttatttcaagtggtgtttctgttccagaagagtggttaaaaggcgactatgatgtatttgaaattagttccgaaatcagccatctaattagtgacacaatgacagaacaaggtgtatttgctgtcgttgctatttcagagcctgacatgatgctattatatggtaagaaattgttactcgtagatgcagtacaagatccaggtaatgtcggcacgttaattcgaactgctgatgcggctggatatgattgtgtcgttttaggcagaggcagtgcagacctttataatccaaaagttattcgtagcacgcaggggagtcacttccatattcctgtcattcaagcagatttatttgagtgggtggcgaatttagaagaagaaggtgttccagtgattggagcagttttagatgaccaagccaaatcactcaatgatatgccaaagcgtgaaacattagccttaatggttggaaacgaaggaaacggcatatcagaagaattacaagatcgactttccgaaaaagtatatattccaatttacggtgatagtgaatcattaaatgtagctgtagcagccggaattttactttatggtttaagaaaataataaaagtggttgataagtcggaatgaacttatcaaccacttttttaaatctcttcttgtttttccatttttacttcacgaattgcgacgcgttttaaatcagctacgacactatgcatataatcaaacgcagcgccccagtcaatcccagtaaagaagccgttcgaactacctgttgagataatcgttacttctgtttctccgtggaaattattaatgttaacaaataatgccgctcgattagaagaacggaagtaaaatttttcgcaagcaagtgtcgctagttctccaaaatcaaatgttctaatttcggaaaatacaatatttgaccctacttgaccagctttgattatttcgaaggtttctgaaacatctgttttaacaatgtagcgaatagatggcatgagagacgcctccttcattaatctatcttacttatattttaagtcagaaggatactttggtcaattatatttcaacttactaaatataagcaacaaaagatttattagttactttctgatgatagatatggtacaataacgttagaggtgagaattatgactgatgcacatacagtatgtccgaagtttgaatcggcgttccaactattaggtaaacgctggactggacttatcatcaatgtcttactgactggtccaaaaaggtttaaacaagttgccgctgagatcccacaaatgagtgatcgggtgcttgcagaacgtttgaaggaacttgaggaaatggatatttgcttaagacaagtttatccagaaactcctgtacgcattgaatatgaactaaccgaaaaaggtaaagcactccaagaagtaatgcttgaagtccagtgttgggcggataaatgggtggaagtacctaattaaaaagagataatctctccaactaatatggggagattattttttagcttgaatctttcgtagaaccatactataatagaaactatctaaataagtaaagacaatgaaagagccaagtagcatagtgagtctgtatagggagaagtggtcatagactgaaagccactttacaaacgaatttgcgaacatttcacctctggagtcgccccccgagaagcacgttatgtgtgaaggtggtccggttactaagccgttatcgaattttgagtgggaacaaattttgttcttattagggtggtaccgcgagaagtctcgtccctttgtggatagagcttttttattttgtctaaaaagaaggagtgaacggtatgttagagcaattacaaacgctgaaaagtgaagcagaaacgcaaattaacgaagcagcagacttaaaaacattgaacgacttacgggtaaaataccttggtaaaaaaggcccgatgaccgaaatcatgaaacaaatggggaaactttccgcagaagaaagaccaaaaatgggttcacttgctaatgaagtaagaacagccttaacagaagcgatttccagcaaacaagaaattctggaaacagcagcaattaatgaaaaattaaaatcagaaacaatcgatgttactttaccaggcacagcgccaagcatcggaacaaaacatttactaacacaagtaattgaagaaatggaagatatgttcattggtatgggttatgaaatcgcagaaggaccagaagtagaactggattactataacttcgaagcattaaaccttccaaaagatcacccagctcgtgatatgcaagatagcttctatattacagaaaatactttattacgtactcaaacatcacctgtacaagcaagaacgatggaaaaacatgacttctctaagggaccaatcaaagttatctgtccaggtaaggtataccgccgcgacaacgatgatgcaactcactcccaccaatttacgcaaatcgaagggctagttgttggtgaaaacatcacttttgctgatttaaaagggacgctgactgttcttgctaaaactatgtttggtgaagaacgcgaaattcgccttcgtccatcattcttcccattcactgagccgtctgttgaaatggatatttcttgtttcaaatgtggtggtaaaggttgccgcgtttgtaagggaacaggttggattgaaattttaggaagcggtatggtacatccaaacgtactagaaatgtccggtattgattccactcgttacagcggatttgcttttggcttaggacctgaacgtgttgcgatgttgaaatacgcagtggatgatattcgccacttatatacgaatgatttacgctttacgaagcaattccaaagcacagaaacgggggaaatctaatgttagtttcatataattgggtcaaagaatttttccaagacttcccgttaacggcggaagagctaggagaagcaattacaagaaccggaattgaaattgaaggcgtagaagaattaagcgctagtttgaaaaatgtcgtggtaggcgaagtattatcatgtgaacgccatccagatgcagaaaaattgaacaaatgccttgtccaaactgacgaagaagagccagttcaaattatttgcggagctccaaacgttgctgcaggtcaaaaagtaatcgtagccaaagttggtgcaagacttccaggcggacttaaaatcaaacgcgcaaaattacgcggcgaagtttcagaaggaatgatttgctcacttgctgaacttggctttgaaagtaaagttgtaccaaaagcttatgcggacggcatttacgttttaccagagcatgttgaaacaggcgtgagcgcaattactttacttggcttagatgatgcgattctcgatatggcaattacaccaaaccgcgcagatgctttaagcatgaacggcgtagctcatgaagtaggcgcaattatccatcaaaaaccagcgcaaccaaccgagcccgatgtatctgaaaaaggtaaagcggacgattttatttctgtagaagtagaaaatccaacagaaacaccttattatgctattaaaatggttgaaaacatcgaaattaaagaatcacctctatggcttcaaacaaaattaatgaaagcaggcatccgtccacataataacgtagtcgatgtaacaaactacattaatttattatacggacaaccactgcattcgtttgactatgataaaatcggtagtaaaaaaatcgtcgttcgttccgcaaaagaccaagaagaaattaccacacttgatggcgagaaaagaatattacaaacaggacacactgttattactaatggaactgaaccgatagcaattgctggggttatgggcggagagttttctgaagtaactgaaacgacaacaactgtggcactggaaggagctattttcagtagttcatctgttggaaaagcatctcgcgaattatatttacgtacagaagcaagtattcgatatgataaaggttctgatgcttggaaagtagaaaaagcacttgcacacggcggagcacttatcgctgaacttagcggcggaacgcttgttggcggcgtagtagaagtagataatcgtgaaaaagcagtaaataaaatcgaaacaagcttaacacgtattaaccgtattttaggaacggagatttccctttccgaaatagaaacgatttttgatcgcttaggatttgtattagaagttaaagaagacacattaattattgaagtaccgactagacgttgggacattacaattgaagcggatattttggaagaagttgcacgtatttatggttatgatgaaattcctgtcacacttccagcaacgagcacaactggtggattatctgacagccaaaaagctcgtcgtgtaatgcgcgcttatttagaaggagcgggacttaaccaagcattaacgtattccttaacatccaaaaaagatgcgactcgtttagcgttatccgatgaaaaaacagtggcgctttcaatgccaatgagtgaagaacatagccatttaagaacaagtatcgtcccacaattaattcgtagcgcaagttataatatcgctcgtaaaaatatggacgtagcactttatgaaatgggaaccgtgttctacgcaacagaaggtgacaatttaccaatcgaacaagagcatttagctggcttaattactggaaattggcacacagctgattggcaaaaaacaccaaaaccagtagacttctttgttttaaaaggaattgtagaaggtttagtgaacaaacttggaatcgaagccgaactgcactggaagcaaatcgaaaaagaagaactgcatccaggaagaacagcaagcatccaattagaaggaaaagaaatcggttatcttggagcgcttcatccagcagtggaagcaagctacgatttaaaagaaacgtatgtatttgaaattaatgtaaaagcgttacttgatgcaacgaaagaaaaagtagtttatcatccaattccacgctacccagaaatgacacgcgacttggccttacttgtggataaagatactgaccatgctacaatctctcaagtaatcaaagagcacggcgggaatctcttagtcgacattgaactttttgatattttcgaaggagaaagtttaggcgaaaacaaaaaatcactcgcttatacgttaactttccttgatagcgaaagaacacttgtcgaagaagacgtacaaaaagcaactaacaaagtagtagaagcattacaagcaaaactacatgctattatccgctagttaactaaaaagaactgaactatttggaaaacattttcgagtagtttggttctttttttgtacagtggaaatcttgcctgttttaacacttcactaactaaaataacacatgttataatggttaaatatgacaaacaaaagaaggacgaaaaaaatgacctatgtagaaatgaaggacgtatctaaattctatcaaatgggcgaaaatgttgttacagctaatgataaaattaattttggaattaaaaaaggggaatttgtagttattgttggtccttcaggtgctgggaaatctaccgtattaaatatccttggtggaatggacagtgccagtgaagggcgtatcatggtagatggccaggatattgctcaatataacgcaaaacaattaactaaatatcgccgcacggatgtcggattcgttttccaattttacaatttagtgcctaatttaactgccaaagaaaatgtggaattagcagcgcaaatagcgccaaatgcattagatgcagaaaccgttttaacccaagttggcttgagtcatagattagataacttcccggctcagttatctggcggtgagcagcaacgggttgcaattgctcgagcattagctaaagcacccaaattgcttttatgcgatgaaccaactggcgcccttgattatgatacgggtaaatcagtcttaaaattattacaagaaacttgcgaaaagactggtacaacagttattgttatcacccacaatacagcgattacgccaattgcagaccgaataattgaaattaataatgcaaaagttcggagcatcaaagaaaatacggaaccaatgtccattgatgatttagaatggtagaaaggagcaagcattgaaacgttcagctttatggaaagatatctaccgagaaatatggcattcaaaaagccgctttatttcaatttttatgctgataatgttaggtgttgcttttttctccggactaaaagcaactggaccggatatgcttttaacagcagacaattattttaataagtatcaactcgccaatttcaatgtccagtcaacatatggactagatgatacggataaagaagctttagaaggtatttcgggagtcgctcaagtagacttaggatatacagcagatactttaatgaaagaaaacaacatcgttacaaaattatattcaagctctgcaagtgataatttaaataaatataaagtagtaagtggtcgtttgccggaaaaatcaggtgagattgctctggataacaacaaagttattcaagacaacatcaaaatcggcgacaaagtaacttttgttaaaaatgatggaagtgaattaacccatacacttaaaaaatcaacgtataaagtagttggctttgttcgatcaccagcatacatccaaaaatccgaacggggatcaagtactgttgggaaaggaaaaacagacgcttttggtgtgattccagaacaagattttgatttgccagaatacactattgccagtctcacttttaataatctagcggataaagaagcttttagtgatgcttacattcgcacggagaaaaaagataacaaaaaagtggagcaagctttagcaggacaaccagaaaaacgactgaataaaattaaaacgagcgaacaaaaaaaattagatgatgccacagccgaaatcaataaaggaaaagcagaactacaaaaaaatcaagccaaactagatgctgcaaaagcacaattggatgaaggcttttccaagtataatgcagcaaaagctagctatgatgccaaaattaaacaaggtgaatcagaaattgctgctggtgaagcggaactagcgaacgccaaaaaacaattagatgccgcaaaaatgcagattaatcaaggcgaagaagccattttacaagctgaaagagaattagaagaaggcctagctgcatggaatgaggccaataatctcctcaatacagcaaatggatacttaaaaaatgcgcgatcaaccttagaaaatgcattaaaacaaccagatttaactgattttgacatcgaccgagaaagcttaactaatgcattcaacatggcggcttcagaacttgatatttcagctgaagagctcgccgaatacgaagaaaccattaacactttgctcgatgattatgaaaatggagccattagcgatgcacaaatccgggaagctctgaacgctgcacttaaacaagttgctgaaggtgaaaaagcctatcaatcggctcgaacagttttagatgaagaaaaacaaaaaatagagcaaggcgaaaaaacattagctagtaaacaacagcaacttgagcaagcaaaaatagcgtatcaagcgggattagcaaaatatcaagccggtcaagaaaaaatctccctcgctaaaaagcaattggctgatggaaaagagacaggcgccgtagaattacaaaatgcactaaaaaaattaaacaatgggcaagcagaatacaataaaaatctcgcactatttgaaaaagagaaaaaggcagctgaagccaaattagctagcgccgaaaaagacgttaaaattggccaagaaaaactcgatgcacttaaactaccgaaatactatgtccttgatcgtaacgataatccaggttatagcgaatataaagaaaatgccgatcgtttaacttctttatccacggcatttccaatctttttcttcttaatcgcagcacttgtttgtttaacaacaatgactcgaatggtagaagaacaaagaacgcaaattggaacattaaaagcatttggttattcgaacggtagcatcattttgaaatatcttgtttatggttcgattgcaagtattggcggaagtatcgttggaattataatcggtttccaattcttcccaaatattatctttaatgcttataaaacaatgtatgaaatgcctgctgtcgacatcggattttattggagttacagtttattatccatttgtgtagcattattctgtacgactttcaccgcatatgcagcatgtcgggcagaactaagagcgaatgcagctacattaatgcgcccgaaagcaccaaaaatcggcaaacgaattttcttagaacgaattagctttatctggaaacgaatgaattttacgagcaaagtaacagcaagaaatctcttccgctacaaacaacggatgctaatgacagtactcggtgttgctggttgtacagcgctaattcttactggctttggactgcgaaattccattagtgatatagctaaaatgcagtacggtcaaataatgaaatatgacgcagcagtttatcaagatatgagcgctccaccaacagcaaaagaaacgtacgataacctaatggaagattctaatatcaaaagtaaactagcgatgtcgcaaacaaatatagatgcagtcaaatcagggcaatccgcacaagcgagttccatcattgtccctaaaaatttaaacgaattaccagactatatcgtgttgcgtgaccgtgctagtcacacaacagaaaagctaacagatgatggagcaataattagtgaaaaactagctaaattattcgatataaaaccaggcgattcgattactgtaaaaaatgcgaagaatgataagtacaaaatcaaagttagcgctattacagaaaactatgcaatgcactatatttacatgactccaacgtattatcaacaaatatttgacgaaaaacctagttacaatttagatttattaaagcttaaagacacttctgaaaaagtagaaactgagttcgcagaaaaattaacagatagtaaatctattttaacgattactttctcaaacaatataagttcgatgctaacggatactctagatagtttaaatattgtcattgtcgtattaattacttctgcagcactactagcctttgtcgttttatacaaccttacaaatattaacgtatcagagcgtatcagggaactttccactatcaaagtactcggtttttatccaaaagaagtgacaatgtatgtttaccgagagaatatcattttaaccttgatgggcattgtcgctggatttatccttggcttcttcttgcaccgatttattatcacgactgcagaagtcgatcaaatgatgttcagccctgcaattgattggacaagctatctattctccggcattcttacccttgtttttgcatccatcgtcatggttgtgatgcacattaaacttaaacgaattgatatgattgaagcacttaaatccgtagaataaccttgaaaagaacttgctatttaagcaagttcttttcatttgacttcaaaataaataaagcttaaacttggaaatagttaagggggtgaactttatttggaaaagcaaaaagtgaaacaactgataaagagttaccaacaaacttacatattcgcgatgacacatatacatcaggctatttctgaaatttcagctaatacagtagacttatcgattgaacaattttttgtattgcgagaaatagctactggtgatgaaataagtgctacagaactttctgcttgtctaaatgtcaataaaagcgcaattacaccaaagttaaaaaaactagaagaaaaaggctacattagacgagaacgaaacaagcatgataaacgcgccgttgttttaaccatcacagaaaaagggaatagcgtttacgaagagtgtgaaaaacaattagagttactcgtaaatgaatggcttgaaattctaggggaagaagacagcgaacaattttttgagttatttcaaaaaattaacaagtcagttgtcaaaccgaaaaaataaaaggagagatttggcatgaaatggattatgaaactccgctgggccattttagcattttggcttgcagcagcagtcgtactaatgtttatcgcaccacccatggcagatcttgtacgcgaaaaaggcgaattaaagctgcctgatggttatccgtcctcacttgcgacagaaatgcaaaagaaacacaatccggatgacaaaggttcagcatacattgcggtgtacacagctgaccataagttaactggaactgagttaaacaatattaaaaaatcacttgattccattgacaaaaataaagatgaacttcacgtaaccaacgttgtatcaagttttaatcaacccgaattaaaggataaattcttatcaaaagacggtaaaacgatggtagcaagtctaactgtagatgacacagatgcctctgttaaaagcattcgaaacgctttagacaaaaaaatggatgttaaaggcgttgatacttacttaacaggaaataaattaattcaagaggatgttgttcagggttcagaagacggtttacataagacagaaggcatcacagttgtctttattttagtcgtattattccttgtatttagatctgcagtagcgccgttcattccacttttaactgtaggaataagttatctcgttgcacaaagcacggtcgctttcttaattgacatctttaattttcctgtttcgacctatacgcaaatatttatggtgtgtattatgtttgggattgggacggactattgtattctcttaatgagtaggtttaaagaagaaatgggagcagggctagatccacgagaatctgttcatgcaacttatcgtacagcgggtaaaacagttatttatagtggtgtagctgtactcgttgccttcacttcgctttatttcgttcaatttgatttatatcgttccgcagtcgctgttggtgtcggtattgtcgtcttactcgcagcactttatacactcgtaccattctttatgagtacgctcggaacccatttattctggccattaaataaaaatattagccacaaagaaaataaagtgtggggagctgctgggaaattcacatttgcgagaccatggattgctttactcatcgttgcagctatcacattgccgccaattttactgcatacaggaacagaatcatttaactcattagatgaaattagtgacaaatatccttctaaaaaaggatttgaaatcgtttcagatagttttggagcaggacaagtcgcgcctacacaagtttttatcgaaaatgacgataacatgcgtacaacagaatacattgcgcaaatcgaaaaaatttccgatgatttatctcacttaaaaggtattgatatggttatgagcgcgtcacgtccagcaggaaaacgtgtcgatgatatttacattaaaaatcaagctggacaagtaaatgacggcgttggacaagcaactgacggagtaggtgaagtcaaaaaaggcttagattctgctagctcagaacttaaaaaatcagaaccagctcttgataaagcagttgctggagttggcgaccttcaaaaaggtaccgtggcaaccgagcaaggcatcaatcaacttcaagctgcactcgcacaaattcaaattggaattgaaagtggcgcaaccggtgcaggagacttaaaacaaggagtagcagaagccaagtcacaactcgcttcacttcaaaatggagaagcacaaattcaagcaggttatgcagaaattcagaaaaacttgcaaaatgtagcagaacaattaaaaggctttggaaatcccaattcaccagcaattgacacatccaagctcgaagcacagtttaagaaaatcggggaatcgttccaaacattcgcagcagcacatccagaagtaagaaacgatcctaaattccaaaaactagcggctgatatacaaggtctacaaacagctggtaatgaattaaaaacaactgcaggacaacaaatggccgctcttcaagcaaaaatgaaagaactaaatcaaggtattcaacaattagcaaccgcaatgaaccaattaaatgaacagtccaaacaaatttcagacggcctaagcgcatttggcactggacttggtcagattgaaactggactcgatcaattagaaaacggtctaaatcaagccgcagacggtcaaggtcaagtcgtttctaaaatgcctgaaatctctaacgccctatctcaaattgcagcaggacaaggtgcactaaaagaaggttttgccggaattagtggacaaatgggtgaactaacaaatggcttaacttcaggagctgatggattaggcaaagtagaaagtggtctaaacacagcgaacggacttattgatgattggtcgaaagttccttacgcaagttctggaatttacgtaccagatgcgctattaaaaaatgctgatttccaaaaagtactagaccaatacatttcttctgatggaaaactagctacgattaatgttattttgacaaaaaatccatattcgaatggagcaatggattccatagatgacattaatgaacaactcgcagctagtatgaaaggcacaaaactagaaaatgccaaaattggtattggcggaatgactagcgctaactatgatacaagagatatgtcaacagccgattatcatttagtacttgttatcgttctagctagtgtattcgtaacccttgttatcgttttacgttcacttgtaatgccaatttaccttatcgcatcacttgtattaacttactttgcggcacttggatttgcagaaataatctttatgcgaattctcggctatagtggactaacatgggcaaccccattcttcggatttgttgtactcgtcgcactcggtatcgattattcgatattccttatgtcacgatttaatgaatataatgggctttccgttcgtgatagaatgataaaagcgatgaaaaatatgggcggcgttatcttcagcgcagtgatcattctcggtggaacattcgccgcgatgatgccagcaggagttctttccttacttgaaatcgcaacagtagttctgattggcttagtgctctacgccatcgttatcttaccactattcgtaccagttatggttaaactattcggtcgtggtaattggtggccatttatcacaagaaaaggcgatcatcaagaaaacgtaccaccgaaaaaataattaacaaaccgcattcctttaatcgaggagtgcggtttttagtttaatttaaaaagttattttgctaagatgggtatagagatgaataaaggaggaaggaagcaaatgataaaactcgaaaatgactgggatgagttattaaaagatgagtttaaccagccatactatttaaaacttcgccagttcctaaaaaatgaataccaaaccaaaagaatatttcctgatatgtatgatatttttaatgctttaaaacacacggcttataaagatgtaaaagtagttatacttggtcaagatccataccacggaccaggacaagcacacggtctttctttttcagtccaaaaaggtgttcaaattccaccatcgttacaaaatatttatttagaattacataacgatctaaattgtgagattccaaacaatggctatttgataccatgggcggaccaaggagtgctcttgctaaacacagttcttaccgttcgcgccggtcaagctaattcgcaccgtggccaaggttgggaactgctaacaaaccgcattattgaaatgattaaccagaaagaagaacccgttgtctttttactttggggaaacaatgcaaaagagaagttacaactactcacaaatccaaaacacattgctttcacatccgttcatcctagcccactatcagcttcacgcggctttatgggatgcaaacatttttcaaaaacaaatcacttcctagagcaaaatggcatcaaaccaattgattggcaaattccttctatataattaaaaacgcctcgtctttatttgacggggcgttttatcatttttttgcaattttcaaggctttttctgtgttagcaaaatgttgtttagtatatttagctaatgtttctagtccaaatcgttcaataatttctgctgcaacaacgtccacgtgtggtccggcaccttttggaagcgggatgccaacttcttttgacatagcatcaaaggcttgcacaaatttatatcgagcaataatcgaagctgctgccactgaaagatgaagtccttctgctttcgttgcgaaaaatacatcttctcgaataatacttggctcttttgctaaatatcgatagtaagtatttttttcagcaaattgatcaattaaaatcgcttctggttttatgggagcaagtttttttaggacattttcaatagcacggttatgtagtaatgctttcatttggccttggttcatgcctcttttttgaagttcattgtatttaggattagggcaaagtagcacactatgtggaacgattggcatgattttctctgctattcggcaaatttctgggtctttcatggcttttgaatctttcacaccaagctcttttaaaagcggcatcatttcagcgtccacataagctgcacaaactgtaattggaccaaaaaaatcaccagtaccgacttcatctgaaccaataacatttttggcggcaaagttcgctggaagaacgcctttagaaacactcggcgccttcgtttttgcttctggaagagtcgcaacccatttttttgcttcagcttctccgttgactccttggaacattactttacgagatttgtagccagtaatcgaaacaccaggtttttttgccgcaaaaacggctccaggtgggagttttgggcttgaaaagggaagataagtttgtttcattttttcgagtgttgattgatcgactatgataactgtatttgcgataaggcatcatcctttcaaagttctattgtaacatactacgacgaaagactgaatatctgttaaacgggtggttgactcttttctttccagctttttcgtgataagattatgacaagtagcggcctaaatgaatttgggcgaggaggaatttacgtggcaaatgagagaaataaagtagtgacaacaatttatggtagagaatatacgattgttggcgtagaaacagctgaccacttacgaaaagtagctcgtcaagttgatgaaaaaatgcacgaaattggctcccaaaatcatgcgctagatagtggtaggctcgcggtattaacagctgtgaatgcaactcacgattatttaaaactagaacaaaaatatctagagttggaacaagaactggctcgaattaaaggaagagattaatgattttaaatgcgattattttaattttacttgtttgcggctttttcgcaggatttagaacaggcctaatcaaacaacttattttattacttggttatattttggcattttttatctcgtatacgtattacgaagatttagcgccacatttaacttttataccttatccaggtagtgatacttcagatggattatccattattttacaagaattaagaacagaaacagcttattacaatgtacttggctttgcgattattttcattgtggcaatcattgttgtgcatatgctcgcttcccttgttggtggcttgactaaaatcccagtgttgcgtcaaatcaatggattattagcagctgtttttggtgttattaagtcttatttaattatttttattgttttgttcgtcatggcaatttatccggcaaattggtctgaaaacctcattgatagctcgacggttgctcagtggatgcttgaaaatacgccaattttgtccgaacaattttatgactggatgacagatattctgccaaaataaaagaaacattcgataccagatgtatactcttagccaattttggataggatttctctggtattttttaatgaccaagcgagggaggaattaagatggctacgaataaaaaagaaatcattcgtttacttgaggaaatcgccacttatatggaattaaaaggagaaaatagctttaaaatatcggctttccgaaaagccgcgcaagcaattgaactagatagcagaagtctggcggaaattgaagactttactaagattagcggtattggaaaaacgacgggtgagattattcaacgctatttggacagcggcgaatgcccagaactcgtggaactaaaaaaagaagtgccagctggcctcgttccacttttagatgtaccagggcttggtggtaaaaaattatcacgtctttaccatgaattaggcgtagtagataaagatacattacttaaagaagctcggaacggtcacattgaagcattaaaaggtttcggtaaaaagtctgcggaaaaaatggcagaagcagtgcgcgaaatgggcgaacgacctgatagatacccactaaatgatgtgttaccaatcattcaaaaagtagaagattatcttgctagcatagacacaattgcaacctttgctcgagcaggcagtttacgtagattacgagaaacagtcaaagatttggattacgttattgctactgaaaaaccagaagacgttcaaaaagcattactagaatttcctctgattacagatgttattggggcaggggaaaccaaagtatcagctgttctagaagataacattacaatttcagtagattttcgcttagtagaaaagaaagcttttgcaacaactttgcaccattttactggttccaaagatcataatatcaaaatgcgccaattagctaaacaatcgaacgaaaaaatcagtgaatatggtgtggagcaagaagatggaagtatgcgtcactttgaatcagaagaaacgttctttaaacactttcatattccatttttacctccagaagtacggcgcgacggtacagaaattgaacgggtgacaaaagatacgaaattcctcgagttaagtgatattcgcggtgatttacacatgcatacaacttggtcggatggagcttacgcgattcctgagatgattgaagcttgtatcgctaaaggttatgagtacatggtaattaccgatcacggaaaatttttacgagtagccaatggtctggatgagaagagattacttgagcaacaggcagaaattaaaaaagtagctgctaattatccagaaattgacgtttattctggcgttgaaatggatattttagcagatggctctctggactttgatgatgacactttaaaacagttagatttcgttatcgcatcgattcattccagtttccaacaatcagaagaagagattatgaaacgactaaaaacagcctgtgaaaatccatatgtgcgtctgattgctcatccaacaggtagaattgtcgtgaaaagaaaaccatatcatgttaatatgaaagaactaatcaaactagcaaaaaatacaggtactgcgctagaattaaatgctaatccacagcgccttgatttaaatcgggagcatttagaaatggcccatgcagcaggcgtgcctatcgcaattaatacggatgcgcacgatacgaaacatcttgattttatgtcgatcggagtccgtgctgcaacgaaagcttggctagataaatctgcaatcttgaatacaaaatcagccgcagaattcaaacaatttttacagaataaataacttttaaaaagaaggatgactaatggaaaaaaaagtagaagccattttagaatttgataaaataaaaaaacaacttgctgaatttgcttcttcctcactaggggagcaagcgatttatgaacttgctccagctacagattttcaagtcgtacaaaaagcgcaacttgaaacagaagaaggagccaaaattattcgtttgcggggaagcgcgccaattactggtctaacagatgtttttgcacatttgaaacgtctagagattggtggcgatttaaacgggctagaaatctaccaaattggtagtaacttgcgtgtaagccgccaaatgaaaaactttatgaacgatttactagaaattggggtcgaaataccattactcggcgcactttctgatgaacttttagtattaaaagatgtagaagaagatattgccatttcaatagatgaaagcgggaaaatattagatacagcaagtgaagcgcttagctcgattcgtcgtactttgcgacggacagaagaccgcgtgcgtgaaaagctagaatcttatttacgtgatcgcaacgcttcaaaaatgctaagtgatgcggttattacgattcgaaatgatcgctatgttatccccgtgaaacaagaatataaaggacattacggcggcatcgttcatgaccagtctgcatccggtcaaacgctcttcattgagccacaaagcgtggttgatttaaataacgaacgcaaagcccttcaagcgaaagaaaaacaagaaatcgaacgaatcctagctgaaatttctgcttcattagctggctggattaatgagattcatcataatacctttattctgggtcgttttgatttcattctcgcaaaagctcgatttgggaaagctctgaaagccgtaacgccacatttgagcgatactggaatcgttcatttaatagcagccagacacccgcttttagatgcagagaaagttgttgctaacgatatttatttaggcgaagattttagtacgattgttattactggtccaaatacaggtggtaaaacaattacattaaaaacattaggcttactaaccttgatggcgcaatcaggcttacaaatcccagcgcaagaagattcgactatcgctgtttttgaaaacgtatttgctgatattggcgatgaacaatccattgaacaaagcttaagtactttctcatcccatatgacaaacattgtttccattttagaaaaagtaaatcataaatcacttattttatatgatgagctcggggctgggacggatccgcaagaaggagcagcactagccattgccattcttgatgcaagtcacaaaaaaggtgcaagtgttgttgcaacgacacactatcctgaattaaaagcttatggatataaccgagcacatgcaaccaatgcttccgttgaatttaatgttgaaacacttagtccaacgtacaaactactcattggcgtacccggacgaagcaatgcatttgatatttcacgccgccttggtttaagtgaaagtatcatcacagaagcaagaagcctcgttgatactgaaagtgcagacttaaatgacatgatttcaagtctagaagaaaaacgaaatctagcagaaagagaatatgaagaagcgcgcgaactagctcgtggtgccgatgctcttttaaaagatttacaaaaagaaatcacgaattactatcaacaaaaagataaattactcgaacaagcaaacgaaaaagctgctggaatcgtagaaaaagccgaaacagaagccgaagaaattatccacgaactgcgcacaatgcaattaaacggggcagcgggaatcaaagaacatgaactaatcgatgctaaaacaagacttggaaaagctaagccaaaaacaattaacaaagctattccaaaagcaccaaaacaaaaaccacacgttttccaagcaggtgacaatgttcgcgtcctatctcttggccaaaaaggtacacttttaaacaaaattagtgataaagaatggaacgtccaaatcggcatcatcaaaatgaaaatcaaaacgaccgatttagaatatatcgagccagaaaaaccgaaaaaacaacgcattatcacatctgttcatagtagtgactcaccagcaaaaagcgagcttgatctacgcggcgaacgctacgaagacgctattcaaaaagtggataaatacctcgatgaagcattgctcgcaggatacccgcaagtagcaattattcatggtaaaggtactggcgcgcttagaacaggcgtcacggaatatttgaagaatcatcgtatggttaaatccatccgtttcggagccgcagcagaaggcgggaacggcgtaacaatcgttgagttcaagtaaacaactgagcaaaaacatggctccaaataggtctaggtgctatactgtgtgtacaaaagtcataaggagtgaattaaatcatggtaaaagaaattacagatgcaacatttgaacaagaaactagcgaaggcttagtattaacagatttctgggcaacatggtgtggtccttgccgcatggtggctccagttttagaagaaatacaagaagaacgaggcgaagcacttaaaatcgtcaaaatggacgtagatgaaaacccagaaacacctggaagctttggtgttatgagtattccaacacttcttattaaaaaagacggcgaagtagtagaaacaattatcggctaccgtccaaaagaagaactggatgaagtcatcaacaaatacgtttaaaattatgctaaaatgaaagaagcttagaacaaacattctaggcttctttttaaatgtgtaactggagttgataaaatgtcttctgaacatatccaaaataaattagcgcttctgccggaccaacctggttgttatttgatgaaagatagacaaggaacaattatttatgttgggaaagcaaaagtgttgaaaaatcgcgtgcgttcgtatttttcaggtacgcacgatagtaaaacgcaacgtctagtccaagaaattgtggactttgaatatatcgtaacttcatccaacgtagaagcattgctacttgaaattaatttgataaaaaaacatgacccacgcttcaatattcgcttaaaagacgataaaacttatccgttcattaaaattacaaacgaacgacatccgcgactaattattacccgccaagtaaagaaagataaagggaaatatttcggtccgtatccaaatgtctacgctgcaaatgaagtgaaacgcattctagaccgactgtatccacttcgaaaatgtagtacattaccaaataaagtgtgtttgtactatcatctcggacaatgccttgccccgtgtgtatttgacgtggaagcaagtaagtataaagaaatgcaagacgaaattgtggcattcttaaacggtggctataaaaccgttaaaaatgatttaatgaaaaaaatgcaagaagccgcagaaaatatggaattcgaaaaagctggtgaattccgcgaccaaatcaacgccatcgaaacaacaatggaaaaacaaaaaatgacgatgaacgatttcgttgaccgcgatgtcttcggttacgccattgataaaggctggatgtgcgtccaagtattcttcattcgccaaggaaaactcattgagcgcgatgtttcccagtttccattttacaacgatgctgatgaagacttcctcacatttatcggccagttttatcaaaaagcaaaccatatcccacctaaagaaatttatttgccagatgatgttgatagcgaagccgttcaagccgtcgttcccgacacaaaaatcatcgtaccacagcgcggaaataaaaaagaactcgtgaaacttgcttacaaaaatgccaaaatcgctctaaacgagaaatttatgctacttgaacgcaacgaagaacggacagtcggggcagttgaacgacttggtgaagcgatggggattccaacaccatcacgcgtcgaagcatttgataactcgaatattcacggtacagatcccgtttctgcaatggtcacattcctagacggaaaaccaagtaaaaacgattaccgcaaatacaaaatcaaaaccgtggaaggaccggatgattacgcaacgatgcgagaagttatccgccgtcgttactggcgcgtacttaaagaaggcctaccaatgccagatctaatattaattgatggtgggaaaggacaaattgatagcgccaaagacgtcctaacaaacgaactcggcttagatattccagtagccggactcgcaaaagacgataagcatcgtactagccaactattattcggtgatcctttagaaatagttccactcgaaagaaacagccaagaattctatttactgcaacgaatgcaagatgaagtccaccgtttcgctatcacattccaccgccaactacgcagcaaaacagggttccagagcattcttgacggcattcctggcgtaggacctggccgcaagaaaaaactactgaaacattttggctccatgaagaaattaaaagaagcatcagttgaagaaattaaagaagctggcgttccacttaatgtggcagaagaagtgcataaacatataaccgcttttaacgaaaaagccaaaaataccgaacaaaaatagattttaaatatagctaacataccaatgattttttagttattggcatgttagcttttttatttcagcatctatgattttcgctagaagtaaaaacaaaagaaactcacccttcccttcaacacataaatgcgctaaaataaaaccattgataaaaaagcaccaaaaagtcaggaggagcgagattgggactagtagtattaaaatttggcggaacctctgttagcaccgtagataaaatcggaaaaacagcagatcaagccatttacgagaaaaaacaagggaataaagtcattgtcgtcgtttccgcgatgggtaaatcaaccgacaaattagtagcgatggcagaagaaatcagtgaagctccagacaagcgagaaatggatatgttactttcaaccggcgaacaaatcacgattgctttacttgcgatgactttaaaagaaaaaggacatgatgctatttcttatacaggatggcaagcaggaattgaaacagaagcagtacatagtaacgcaagaattgctgatattgatagcgcgcgcattgagtcagcacttgaagctgggcaaattgttattgttgcagggttccaaggtataactacagacggcgaaattactacactcggcaggggtggctctgatacgaccgcagtagcaatcgcatccgctttaaaagcagaaaaatgtgctatttgtacagatgttgtcggcgtattcacaacagatccccgttacgtaaaaaaagcccaaaaactagaacaactaacctatgatgaaatgctagaattagccaatctcggtgctggagttttacatccacgctccgttgaatatgcgaaaaatttccgaattccgcttgaagtaagagcgagtcatgaactagaaccaggtacaatgattgaggaggatttaacaatggaaaataccaaagtagtccgcggaattgcttttgaagatcaaattactcgtgtaaccattcactggaaacaaaaagaagcgatgcgcgtttcaaaagtttttactaaactagcagaaaataacattgatgtagatattatcattcaaggtatcacaggtcttggtcacggcaacttatccttcaccattaaaacaagcgaactattagctactctagctgttttagaagaaagtaaagaactacttcaaatcgaaaaactagaatccgagcaggaactagcgaaagtatccattgttggttctggcatggtaagtaaccctggagtcgctgcaaaaatgtttgaagctttaactgaaaataatatcccaataaaaatgataagcacttcagaaatcaaagtttcgacggttgttcctgcccgtaaaatggtagaagcagcacaagttttacatgaccaatttgaattagataaataaaaataagcttgaattaacgagctacatcccagttaagaggggtgtaggcaagttatttcaagcttatctttttagtaacgttcttcgttatcaatcgtttctttacgatcccatttaacgataatcgtcacttgttttttacgtttatctatttcatcgtaactttctgtatagagcttcttctgtgtttgtaattgctctgcgataaaaccagcttccaatttaaaagttggattttcttgtgtacggaaccgcgaaacaaccatgtcaccttctaaaagtaaacgcaactcatctttcttttcctttaaaatactaagtgtcccaaaagaggcttcttcaaagaattctcttatctcttccatggattcaagtgggaatttacgcgctaagtctttcccagcccagtacataatgtgaggcgcttcatctccaaggatttcaggaattaaataatctcgcagtacatctaatccaaaacttggaacgagtgctttttcctcgtaattattctgttcattttctgtcatttcggatacctcactttcatacaccattataaccaaaatcaccctaaaatggaaagcacaataaataaatttctataaaaaaccttttttctcaaaaaagacttgcgaaaaaagcgaaaaaataagaaaatggaaggtatagataaaaaaatttggaaattaataaagaaattgaggcgagactgtgaaacaagctataggctttatcgattcgggagtaggcggtttgacagtagtgcgtgaagtactaaagcagctaccccatgaacaagtatattatttaggtgataccgcacgttgcccttatggaccacgcgacaaagaagaagtagctcagtttacttgggaaatgaccaattttctcgtagatcgtggcatcaaaatgctcgttattgcatgtaatactgcaacagcggcagcactatatgacattcgtgaaaaactggatattcctgttattggagttattcaacctggctcaagagcagctcttaaagcaacaagaaacaacaaaattggcgtattaggaacgctcggtacagtcgaaagcatggcttacccaacagcgcttaaaggactaaaccgccgagtagaagtagattcactcgcatgtccgaaatttgtatccgtagtagaatctggcgaatataaaagcgccattgcaaaaaaagtcgtagccgagtcactcttaccactgaaaagtaccaagattgatacggtgattttgggttgcacacattacccacttttaaaaccaattatcgaaaactttatgggagatggcgttgcggtcattaactccggcgaagaaactgctagcgaagtcagtgctttactggattaccataatttattagatgcgacagacgacgaaattgaacatcgttttttcaccactggttccacacaaattttcaaagatattgcaaaagactggttaaatatgccagatatgacagtagaacatataaaattaggaaaataagaggtgccactaatgagatttgatggaagagaaaagaatgcattacgagaaatcgaagtaacacctgattacttaatgcacccagaaggttctgttttaatcgcatcaggaaatacaaaagttatctgttctgcaagtgtagaaacaaaagtaccaccatttatgcgcggggaaggtcgtggctggatttctgctgaatattccatgttaccacgggcaacgaatacacgtaatatccgcgaatcttctaaaggaaaagtaactggaagaacaatggaaattcaacgtttaattggacgggctttacgtgccgtggttgacttagacgcacttggtgaacgaacaatttggttagactgtgatgttatccaagcagacggaggaacacgcacagcctctattactggtgcatttattgcaatggtcatggcgattgcaaaactagatgaagaagttccgttcacgaaattcccagtcaaagattttcttgcagctacaagtgttggcgttttagaagaaggtggaacagtacttgaccttaactacgtagaagatagcgcggcacaagtcgatatgaatatcattatgactggtagcggagcctttgtagaactccaaggaacaggcgaagaagctactttttcagaaaccgaacttgctgaactaatcgctctaggtaaaaaaggaataagcgaactaatcgaaatccaaaaagaaacactcggcgacaaaatcacagcgcggattaaaggagaataaaaaatgagtaaaattattattgccaccgcaaataaaggaaaagcaaaagaattcgaaaaaatctttgcgaagtttaatatcgaagttgctacccttgctgattttccagaaattggtgaaattgaagaaacaggcacgacctttgctgaaaatgctgctcttaaagcagaaacggtcgctagcttgctaaatcaaacagttattgctgatgattcaggtttaattgtagacgtgcttaacggggctcctggtgtctattctgcacgctatgctggggtcgctcatgatgatgcaaaaaataatgaaaaactacttaaaaatttagaaggcgtagaaccagcaaaaagaactgctcgtttccactgtacacttgctgtggctacaccctctgagaaaacaagtttttatacaggagaggtagaaggagttatcgcagaacaactatgcggtacaaacggcttcggttatgatccactatttttcttaccagaattcggtcttacaatggcagaaattccagcagagaaaaagaatgaaatcagccaccgagctaatgctattaaacagctagaaaaagatttagcagaagttgtagaaaaagttactaaaaagtgagagaataagtaacagagcactagggggaggaaataaaatgaaattattagtagttagcgacagccactcagaacgtgactgcttaatccatcttaaagaaaaatacgaaaatacagtcgatgccatgattcattgtggggattctgaattagaagctgatgatccagcgattcaaggatttcatactgttcgaggcaactgtgattttggcggaggctttccaaatgattgggtaggggaagtggatggctatcgtatcttaaccacacacggacatctttataacatcaaaatgacacttatgaacttacgctaccgagctcgtgaattaaacgctgatttcgcattttttggtcattctcatgaactaggcgttgatatgctagatgacaccatcattttaaacccaggaagcatttccttaccaagaggtcgcattcgcattaaaacatacgcactcatcgactctacaccagaaggaatcaaagttcgcttcatggatcgtgacgataacgaactaactgacctaacacaagtttttcctttaacaaagcacaactaggtcaaaagacacccaaaaaagaaaaaatgcaataacttaaagaaaaccattgacaaacaagcaatttaaacataaaatggtatttggctgttgaaaaaacagtgccatttgtcctgatagctcagctggatagagcaacggccttctaagccgtcggtcgggggttcgaatccctctcaggacgttaaataaagcaccataaacgttggtaatacaatgtttatggtgctttttgatttgcggaagttcaaataatggtgttcaagcagttgtatctattaagaggggaagacaacattgaatgcctcttagaaataataaatgctactctaatatgtcttttagtaaataatataggtgaagactgataaaaatcatatgaaattcttgtttgattttataagttaattagttaaataaaaaaggggatttcatttaaaaaaacaacatatattttaaatgaatatgtatttttcgagatattcgagaagagtaaagcataaatcgtgtataatgaactatattacgtgttatcttgtgattaattacacaatattgcacctatcgtttaagaaaaagtttaagtaagctcttttttgttgttcatgactagaattggacatttcattatatttttggttatacattatcttattgtattacgatgaaactagactaggaggagggagaaaaacatgaaaaaaggatttttttacgctatttttattctcttagtaataatagcaagtacattatttgctctcaacatcatttccagtgtaggatggatggctagtgttttttgtttagtgatagtcgctataatatttacgaacatgacaaaaaaacggacataacggagggaaaaacggttatactttagagcattagatcgtattagcagatgctcttaaaacgctaaacagtaaaataaaaaatctctaaaacatttgaaaccctttgtaattaaaaggtgaatgttttagagatttttttatcttgcatttcccatttttattccgttgtttttgtggcaaattttattaaaactagttcaagtaattacgaatctcattggaagcgaagaactactttataaaatagtcaaaaattaggacaagcagattattgagatgattgatcctttactttaataataatttttatgtaaactcatcccttattaggtgttctattgtatgacttgagagtagtttttttgagaatttcaagcaataaatttaaatatattagagagtctaaaattagtactaatccctaaaaagatatgaacgatatgtgaacgatgataccaagaaatgaaaaaatctctatactatattcaaattacaagcttgggactgctataattagtacttattgaggcgatatgatgccacatacattaaatacagaataaactcattctttaagataataattacatctaaggagactaatcatgaaaagaaagataagttctatcattgtagtcgggataatgctctttcaatcattaactatgtatccatttatcaccgaagccaaagaaaatgaacaaaaagaagaaataaataaaccctcaaaaataactaagggattaactaattccctaaaatacactaagacaattcttgaaacaggggacacctatgatagtgtatttcctgacagtgctttagctaaagtagttgctaaagaagcaacggggtcagagaatacaactcagctagtaacacaagcagacctgaataaaatcaaatctctcaatggttataataaaggaatcagcgtattaacaggaatcgatttgctagtcaatgtgacaagtataagcttgaataataatcaagtaacagacatttctccaatagatcaattacctaatttagtaagcctatcggtaaaaaacaatcaaattagcagtcttatcttaaatgcgcaaaatcaactcccgaaactaacaaccattgatattgaaaataatcctgatcttaatactatcgatatccaagatcaaccccaattggtagatgtaaagacatccggttatacaggattacgtaagttaacaacggtaattgccaaaaacaatccagaattagtcaatttaggccaatacactatccgaaatgtctactttagccaagtagcaagtttaacgaaagttgaattagtcaatctccctaaggtaagaaaagtaaaccttgagaggaacagtattaatgagctaaaagttactgatttggctattgaagatctgccattagaagaaaatgaattaacagatacagtattcgataacatccaaaatctgcctaatttaaaaacgttagacctgtcaaaaaaccaactagaagaagttgtgttagacaaaacggatgtagaaaatctacccaatttgatgacattagatatacagcaaaatttggctataaaattgataaatgttcaagatcaaccccaattggtagatgtaaagacttccgattataaagaattatctgcgttaacaacagtaattgccaaaaacaatccagaattagtcaatttaggccaatacactatccgaaatgtctactttagccaagtagcaagtttaacgaaagttgaattagtcaatctccctaaggtaagaaaagtaaaccttgagaggaacagtattaatgagctaaaagttactgatttggctattgaagatctgccattagaagaaaatgaattaacagatacagtattcgataacatccaaaatctgcctaatttaaaaacgttagacctgtcaaaaaaccaactagaagaagttgtgttagacaaaacggatgtagaaaatctacccaatttgatgacattagatatacagcaaaatttggctataaaattgataaatgttcaagatcaaccccaattggtagatgtaaagacttccgattataaagaattatctgcgttaacaacagtaattgccaaaaataatccagaattagttaatttaggttatcccattatgcaaaatgtttactttagccaggtggcaagtttaacgaaagttgaacttgctaaccttccaaaagtaagagcagttcgattggaacgtaatagcatcaatcagattgaactaaataatttagtttcagtaaaagacgtgaatctaaatactaacaaaataacaaatgatagcatagagaaatttagaggcatgcctatactagcaactttaaatttaaacaaaaaccaaattaccaatataaatatgcttgatggtttcccacaaatgactactttaaatatcgatttaaactccatcagtgttttaccaagtaaccttaaaacaaaaatgccaaaactatcgagaattagtgcattaaatcaaacagttactttaggtaaagcaattgtagtggatgattccgatttaattattaataatgagattagtaattttgaaaagttaaccgagccaagcccaatatcaaattttggaacttacgcaaatgaaaaaataacttggtcgtctgaaagaataaaaaatttaacagaggtcagctttcagttttctgagctaattaatgtgactggtatagatggaactttttcaggaaaagtaacacaaccatttaaaagatcaactaccccagtaattaatgcagattccgaaattcattatccacaagggacagaaaaaacagaagcagagtttttaaaggatgttcaagcgcaaacaacggatgatttagccattaaaagcgattttgaaacaatggtgaatctcaagaaagtaggaaaatacacagtaacattaaacgtagagaatctggatggaattaaagctactccaaaagaagtgattgtttatattgatgctgtacaaggtgcaaatataactgtgaaatatgaagacgaatcagggaataaacttgcggaaaatagtatactaactggaaatgtcggtgaagaatatagttcaagtgcaaaagaaattttaggttatacactaactgaaatgccatcaaatgcacaaggagaatttagcttagaagaacagactgtgacatatatctattcgaaaaatcccgttccagctaaagacatcacggtacaatataccgatgaggatgggatggaattagcaccaaccgaaacattatcaggtaatgttgatgaaaattatgttacaacagcgaagacttttacaggatacgaattaattgaaacaccgagcaatgcagaaggaaagtttagcgaaaatgcacaaacagtgacctatgtgtatcgcgcgattaaagcagagccaattttagctaaagaagttacggtgaactaccaggacgaattaggagctaaaattagtgaaacggaagtattgactggtgaaattggtgaaacatacacaacagtggctaaaacaatagatggctataccttaattaagagccctactaacgctaacgggatttttaacgagaatcctcaaacggttacctatgtgtatcaattacaaaatagcccaatagcagcaaatatcaccgttaaacacttggatgaaaacaacaacgagctagcaccaagtgaggtactaagcggaaatgtcgatgaagcatatacaactaaaccaaaagaaataaaagactattcgctagtaaaagtaccaactaatgctagcggaaaattcacgacagaagcacaaactgtgatttatcactataaaaagaacagtataccgacatcatcttatattactgtaaaatatgtagatgaaacagggaaagagctggccataagcaaggtattaaacggaaacattaatgattcctacgcaactacagccaaggaaattaaaggctatacgctagtgcaaaagcccgctaatgcaactggtaaatttacggatcagaatcaaactataaaatatgtatatcgtgctaataaagccgaagtaaatccaaatccaaattcagatgtactagggagtaattccaatggagatattcaaccaacgaatgatattaagccaacaaacgatgtccaaccaacaaatgaggctccacaaaccctacctaaaacaggtagtcagccggcaaatttgatctttggattaggaattttactagtacttcttagtacccaatggctacaccgaaataaaagaaaaaaagctaaatctcataactgctgataacgtttcttgaaaaaactctccttatcataaggagagtttttgtttattaaaataattttacctatcaaatagtgaaggcagcgagtcattttatataatcactactaagttaggattaatacgcttccttacaaaaatcttcttacggttagcagtttttttatattacgcttgaatttccaaaaacaggggtattgtacaagtgttctaaaaaaagataattgaaggaggatttttacatgaaaaaaatgctacctgagagtaaagtagaatcaataagaaaagaaggatttttaaatcgagctgtggaggcataccgatttttctatccaaccgtttcgaatgtatcaaattttaaagcattacacgatttaggaattaccgagaatcacgattttattattcaacttacgactcctgacttaaatgtactgacacaaaattcagataccccgtattgtcttggaacagggaacacagagaatggtcctgttgtcatcgaattaccgctgggtgccattgttggtgtggcggatgatattaattttaaatttattacgaatatgggattaacaggggatgaagaaggtaaaggtgccaagtatttatatcttcctcctaattatgacggggatattccagaaggatacatagttcgcaaaccatctagttttaggtttttaatttgtttacgggcgatggtccaccaagcaagtgattatgaaaaagcatttgagttactaaaaacagtaaaattttatccgctaaaagaagcaaaaaataatccaaccagtactttccatgatttttctcatcgtaaagccatttcaacaccttattatgttgaaggaaaattcgattattgggaagtaatcaaatgggcgctggataatgatgaaacagatccagaatattaccaaatgtatggcttactaaaagcaattggactggctccaaataaagaatttaatcctgattcagacacaaaagcattgttaattgaagctgccgaaaaagcagataagatgatgtttgtgaattcctttaatacagatgatcctgcagccattgtttggccagggaaaaattgggaatgggctgtatacggtgagaataatgacttctatgaaaaaacgtatttaaaccttcctgtaagagagcgctggttctatcaagcgacactcgaaacacacatgatgtttatgcataaagtcggatttggttccgtttatatgcttggggtgaaagataaagaaggaaactatctggatgggggtaaaagttatacattaaaagtgccaacaccagtaccaacgagcattttctggtcggtaacggtttatgagatggatactcgttcggaaattgttaccgagcagtttatgcctgcacttaattcaatcaaagatacctttgaagctgatgcagatggcaatacaacgctttactttggaccaaatccaccagaagatgagtcgctaccttggattcaaactgttcctgatgccaattggttcacgtacttccgtatttacggaccaactgaaccagcatttgacaatagctggcaactatatgattttgaagaagttaaataaataaaaagaggcgtaacttttaatagttgcgcctctttttattaatcattaagtcctaatccatctaaaatcgttgcttcatatttctcaatgcgcgaaacacgcgtttttgattgctttggagccgcaaaataaagcaagtacgctttttggcgaccaggagttaacgcttcaaaagctgtttttaaagcaggtaattcctcaaatttcacaagtaactcttctggaataggcgtttccgctcttggtttaagcgctacttctaaaccagctttttcaacttcgattgcattttgaatatatttttttaaaatctctttttgatcaagaatttcttgtaaattagtaaagcggatttgcctagcagcttgcacattttctgtttgttgcactaaaatattgtccggatcacggagtagtgcgcctttcataaataacagggcacagtagtttttaaaaccatgaattaagaaaacgttgctgccattaatagcataacaaggttttccccatttaaattcttcttctagttcaaatgtgatagccatttctcttaatgctttgaattcagcttgccaggtagaaggtttattaaggaacgaatctactttgggatttaattctgtctttgccataaagaatacctcttttctaatcttaaatatgtgctgttttacctcgtacaaatatgcttttttaggacaaaatgacttaaagaaagaacctgaaacttatcccaggttcttttacttttaggataaattaagctgccaaccaataccaaacttatcagtaacttgaccatatttttctgaccaaaatgtttttccgagtggcataataatattgccgccttccgcaagttgatggaattgttttgtcagttttatttcgtccgttgtatcgataacgagtgtgatattgtctccaaatgtaagtggcatagacttcggcacatcggaaaacatgacttttactccatcgagtactaaactagcattcattactaaatcttttagcgaatcttctataggttcttcagcggactcgatttccccatatgtcatcaaatctgtacactttgttccaaaaatttcttcataaaacgcgatagcatctctggattgtgttctaaaattcaagtaaacatttaacgtcatttgaattcctcctcgatttttattcgctatagttctattcattttggtgtatttattatagcagatactgcgtgaaagaggaaaaattaagaagataaatacttgacttggagctactccagggtgataaactaaagagaagatatagattcggaggaatttagatgaaaaagacattatatttaatgcgccacggtcaaactttatttaatcaacgtaaaaaaattcaaggtttttgcgatgccccacttaccgacctcgggattaaacaagcaaaaatcgctgggagttactttaaagaaaataatataacattcgatcaagtttacagttccacctcagagcgcgcatgtgacacgttagagctgattacggacaaaagctatcaacggttgaaaggtttgaaagaatggaattttggtgcttttgaaggcgagagcgaagacctgaacccaccactaccatatggagatttttttgccgagtatgggggagagcgagaagtagatttcagagaccgtttagtaacaacaatggaacgtatcatgagccaagagaaccatgatactgtcctcgctgtttcccacggagcagcctgtgctcaatttgccagatattgggaaaaaacaagcaaaattggcaaagtaacaggactgaaaaattgctgcattctgaagtttgaatatgaaaacggtagatttactttagttaattttattaatcatgattttgagaatgggacgcatatggaaagtgttaaataaacaactcatgaacgttaggttttatacgaaagacaatatagttagaagaggtgcaaattagcatctctttttgtatacaattgttattgttttaaaaatttttcaactttttcaacaatctattgcgccgtttttcacaattcgatataattattattgagtgaatacaatattacacataagaaggtggaaagaatgtcaaaatatgatgctgaaattgttaatgcacaacaatccatcaccggacaacaagaaaaaatacgaagattaaaagaacttatcacaaaaatagaaagaaaaggtgaacagattagttccatacctattcgccaaatcgatttaccatttgatttttggcaaggtaaatctgatagtgtcatgagagaagtacttcaaaggcgacttcaattttggaataatcaaaatgctgtagtgaatgaccttgtacaggaattgcgcgcagcgatgactaaaatgcaaaatcagataagtgattatcaagcggatattagctactatacaaatttaaaacaaatggaggaagaagtaaatgtctgatatacaagtaaatgaatcacaaataattaaaagtatgaatcaatttgctggtaagcaaaaagtactttataaaaaatcttcctctacttcccataataataaactagctacatatcataaaatacaaactatattaacaaaaatggatactcaaatgaatcaattacagcagttaggcgagcgaacgacacaagacatagagaagaattgtgctgaattcgttaacttagataaaaatctattaactgatattgaagtaacggggtgattgtaaaatgaagatagatgtcagagaattaaatgagatagttagcgagaatatagtaatgcttaagaaagagtatgaaaatttaaatatagcaatgaacgctacaaccaatttcacagtagaaactcaggaattttttaaaggaaaaacagcagatgcaagtcgtgcttatctacaagaggcatataaacctgtacaacaaaaagcgctagaagttaataaattgatgacaaaaatattgagcgaatatattgcagatgccgaggcacagttcggagcaaatggtatgatagatattcaatctattgaaatggaatacaagcgcagttttaatcaagttagtgatgatgaaatgagagaataccgcgatttgaataatcttattcaagaggcaaacgaatttacttactttcagtcgagtaatttaggtttttttgaagaattgcatcatgatgctttaacagaaataacaaatattcgcatgaaactagaagactttgaaaccaaatggaatgttgaacttagtaaagctgaaaaattacaaaaagagcttgattggatgttaacacaagttaatgataataaaataattccaacaagctatcaagccggaacgctcccattcggtaagccatttaaatcacgagatgagtttgatacagtgcaagaatattaccaatatgtcgttgaatgggcagtggcaaatggtaaagcgaaagaaatcattgttgatgggcaaagatattatgagtttaccgatactttttattatgaaaattataataaggaagtcaatggaacattagttatgacagaagtaaatggagaaatgatattatttgtacaacgtaaagatatagagagtgcagtttctgttccttttggagtattttacccagatccatttcaaaggctagcaaatggaggagaaacagatggaactataaaattatatcactggaagagcaaagatataccagaaggactaagtgttccaaacgaagaattaaaggctatggcagatttcttcgcagatacacagaatagttatgatgcaggtatggctatattaaaatatttggctcataacaaaaatcctgaaaagctatcatttacagatacagaattagataaagttgcaacgaattggtctggcggtaaaaatagatttgactttgcaggtgaagttgaggcgcatgctgatatgcttactgattcaatactaacagaacttgccgcgaagccaatggataaaattgatagacctggtaatacagatgaagagaaggagcaaggatattatcacgcagcttcaatagctgatatgcaaaaaggagaagatggaatgatgaacaaaagttttaattcgatttggggttctggccaatattcagcttatcttcaaaaccttatgcatggacaagagaatacgccgaaagctaaaaagagaagtttcccacgccaataattttttataaatactagtagtgatttacaatgtaataatcataaaaagctagttactattaataagtaattcctttcaaaatttgagaatggaaagcactaaataaaaaaacgtaaacattaggtttttttatgaaagaatatatagttagaagaggtgcaaatttgcatctctttttgtatacaattattcttactttagaattttccaacaagccattgcgccgtttttcacaattcgatataattattattgagtgaatacaaaattacacctcaatttttaagaacgtaaatgaaagaatactgaatgggtgaattatgaataataagctaaaatttattttaaaaacactattaggggtgtttttactatctctttctatgtatctttttttagctcaattcagcaaattagttggctagaaaatagtagtatggaagatagaacacggtactttttacaaaggaaatttaatgatgattggaaagatatctccccgaacttagcatttgatttcaatgttgaaagtggtcgaaataaattaatgacagcgcattttgatatatccgcgcaagtcgaaaatagaaaagatgatttacacacatttaaaactaaaaagaaaagtgagttcagtaaacttattacatttgatatcgaagtaattaaaaatgtaaaagcaagtactaaaattgaaaagaagcagacagtatatatacatccattacctgtaaaagagaacaatgaaatttatacacttcagttttctaataatatgtatcaacccaatcgaaaaatggaaaaaggattagacatacggtcatcagatgtggttgatagcgtaatttcttctcagaaaaagtatcaacttttacttgagcagatcacaacaaaagaattatcaagcaaaaaactaacaaagaatattatacttttacttagcattttggttttgggagcttatgcatatttaataattattaaaaagtagaaaaagcgcagtacaccaagcgggctcagtgtactgcgctttttcatttattgaaacaaattctttattttatccaaaaacccaccagttaactcattcgcagtatcttgcaagttttccgtaagtccgctcgctttatcttgcagattttccgttaggtttgtcgcttcattctgtaaattttccgtgacattacttgcttgttcgccaagctcagatgctttggttgttgcctcttctgtcagtgttcctagattttccaggggcagggactcggtaactttattcttcaaatcatctaaattcattgtttcctccttattttggaagcttagagtccattttaaaggaagtaggagcgaagtacaaacaattcgttccgtcatttgtgaaaaaatatggtatgatgatatgaggaaatgaggactgacatgaataatttaaaattaagtgaagaaattaaaagagccattaatgaactaggatataaagaagctacccctgttcaaaaagcagtaattccagttgccttaacaggagaagatattgttgctaaatcacaaactggtagcgggaaaacagcagcatttgcgattccaattgcagaacaggttgtttgggaagaaaacaaaccacaagcgctaattatcgtaccaacgagagaacttgcaatgcaggttaagacagaatgtacgaatattggacgatttaaacgaattaaagcagcagcaatatatggacaatcaccttttgctaaacaaaaattagaattaagtcaaaaaaaccatattgttgttggaacgccggggcgattactggatcatatcgaaaaaggatcacttaatgtcgataaagtagcccatttagttttagatgaagtagacgaaatgttaagcatgggctttattgaccaagtagaagatattcttagccgtttaccaaaacagcgtcaaaacttatttttctcagcgacattacctgaagaaatgcaagatttaattaaacgctatcaagataatccaatggtaattgaaatggcttctgaaaaaacaaatccaatttttcatgtggaaatgcaaacggataataaagaaaaaacgttaaaagatgttttaattactgaaaatcctgacagtgcaattattttttgcaatacgaaaaatcaagtcgatgaactcaccgatttactcgatgtaaaagctagtaaaattcatggcggtttaagacaagaagatcgtttccgcgctatggatgatttcaaaagcggaaaatcacgtttcttaattgcgacagatgtagccggtcgaggaattgatgttgataatgtctcgcttgtaattaattacgatttaccaattgaaaaagagaactacgtgcaccgaatcggacgtactggccgtgctggaaaaagtggaaaagctatcagttttgttaaaacgaatgaaaatccgcttcttcgtgatatagaagaaatgctaaatattacgattgagaaaaagcggaaaccaactatcatcgaagtaaaagcaaatgaagaagctttccgtaaaaaacaacaaaaacgcccaaccataaagaaagctcgcggtgaaaaactaaataaaaatattatgaaactttattttaacggtggtaaaaagaaaaaaatccgtgcggtagattttgttggaaccatttctaaattagaagggattacagcggaagatattggtattattacgattgaagaccatgtatcctttgtcgaaattttaaacggaaaaggcccagctgtccttgaaatgatgcgctcacgaaaagtgaaaggcagacgtctcaaagtcaacgaagcaagaaaacgataatttaaagcaaagaaggtcacgcaatggaaaggccagataatcgacttattataatggtgttagaagttgtcaaaaatcctgtatacaatataaaatcattaaccatcaattttctgcaaagtgatattgttggcaattctacgagaaatgagttgttatactgcacttactggcttgaatttcatggctttatcatacgtgacgaaaataataataataaaaaatattatagtatgacgcagcaaggtaatcatttacttcaaaaaattaaaaatgaactttcttagtttgttcatacttttttcatatttattcggtatattaagagtaacctttttttcaatgaaatatctcacctgacagcatccgtttcccaacctaaacacggatgctgttattttttatgccgttaaatatgctatactaataaaaacgaaaaaagaaggttaaactatgtataaatacacgctctgctttatccaaagagctgatgaaattttattattaaacagacaaaaatccccttggatgggaagttggaacggcgttggtggaaaaatcgagcccggagaatcactcattgaatctatcaaacgtgaaattaaagaagagactggaattaatgcagccgactacgaaatacgtgatattggtgaaatgaaatggtttgtagaaggggagaaccttggcggcatgcatttgtttgttgctaaactgaaagatgactttatataccaaaccccgctggcaaccgatgaaggaattctcgactttaaaaaaatatcatggatacttaatcaagagaatactggtgtagtgaacaatctaccttatctgatcaaacatgttccggatgatttgaagagaatagaagttacaacaaaataccgtgaaaatacattattacatattagccatcaagtcttataaaaaaagcattgcgctgattcgcaatgcttccatttatcaagatgtagtaaaataattagcttcccatctactaattaaattttgagcatcatcggtagataattttttatggccgataatttgttctttcgcaatttctagactttcaaaatgatcaattaatcgctgcgatgggttattaatatagacgtcactaagcaaaatagaatgatttttttcactttcaatcgctcggactcctacgatataacctgctgcggtaatgagtaataatttattcataattcttcgctcccttttagttgttcatgtgcgccactggacactttttttctggataaaaacatgtaaataaatacgcaaacaaatgcgatagcaccagcgataatgtaaataccttggaatgaaagaacatgatgaatttcacccataatataaggtccgataccaaggcctaaatcaagcccaataaagtaagtagataaaccaatgccaatacggtggggttcacaaactttcaaacaaacagcttgtccattcgacataaaagttccataacctaaaccaattaatccacctgaaataagtaaaacaatacttgatgttgcagtactaagcacaactagaccaactgctaaaaagagataactaggatacatgacatatttttcaccttttgcatcaaatagtttccctgacataggtctggtaaaagtaataactaacgcatagacaacaaagaaaaaagtaccagcgctaactaaattaatttctcgcgcatacgaagcaaggaaggtaagtacgcttgaataagaaatccccatcaaaaaggcaataaaagtaatcggaataacttttgtttcaataaaacttttgacagtccaagtttgtaatgctgtccgatgttcttttgttaaaacaatattttttactggtagatagaaacaaagcagtgcagttaataagacaataaccgtggaaaaaataataatcgtataaaagcttgttttacttaacaaaatcattccaataaatggtccaatggcagcagcaagactcgtactaagaccataataattaatgccttctccgtttctagaattaggaatataagcagtaacaatggcatttgttgcagtagaagttgttccatatgcaaacccatttaaaaagcgaataataaacataattgcaatcgtcggcatgtataagtaagccatcgtcgttactaagaaaaataaaataccaaaccttaaaacttgcttacgaccaaataactcaagctttttccccatataaagtctcgcaaggagcgtaccaataatataaataccagaagcaaaacccgcttcgccgagtgatgcacccagctcttcttgggcaatgacagcaataatcaccatcagcaaataatagacaagataaacgacaaagttaatcaatgttattaaaacaaaacccttattaaataatttttctttcataaattaaaatcccttcctacgtgtgatttatctcagcgacaaagagtattataggcgaaattttaagagtagactttttaatttggtaattatttctgatatatacaaatttgtataacatatgttgaaaaaatagggaatagtattttgtatgattaatatgctttaactggaatgacaaaaaggaggttaagaacatgaaacaaaatattcttaataattatgtaagcacaaatgattttccagttattacaaggggaaaacgtaaatatttaacttacgaagggcttgaagattcttatgtgtacatacttaaaaaagggattattaaaacgagtattatctcaagggatggcagggaatttaatttaaactacattaataaaatggatattatctcacttttaaaagatgagtattctcaatttgccaatgcgccgtttaatattcgtgtggaatcagacacagcagaactatatcaagtagaccgagtacgtttttggaaagatgtaaaccgtgacgttgatctgcaaatttatgtcaaagattattatcgcacaagacttttacaatccatcaaaaaaatgcagcaaatgctgatgaacggaaaacttggcgcaatttgcacacagttatacgaactttatacacttttcggcgtggaaatcgaaaaagatcaatttttaatcgattttttagtgagtaatgaagaaattggtcacttttgcggaataaattcagcgagcagtgtcaatcggatttttcaacaattaaaaaaagagggcgtcatcaccatgaaaaatcgctatattatcataaaaaaattagatgttattcaagaaaacgtaattttttaaaggataacagtagaaaagcactgcaatcataatttgcagtgcttttctatcctctttttttaaatgtatatcgaactctaagtgtaataagcccaatgatgattagcaaagagccaaccagcatattttctaagtcgctaaagtcccaaaaaatagaaattccgatattagatagtcccaaaaaaacaaaaaccaagccaacaacaagtaaaaccatatatgccggtttagatattttcataaggacgcctcacttacattaaaaataatttccacatcattgtaacataagtttcataaaacaacatcattcgcttgtaatttgttttgtgaatccttctccaacaacactttgcacgtcattaataataaagaatgctttttcgtcatatttattcacgatttttgttagtgggagaagttgatcacgactaatcacgatataaaggatttttttatcttgacgcatatagaatccttgaccgttaaacagcgtaatacctcgttccaaattcgcatcgatttcggtagcaatttcttcatagtagtcagaaataatcgtaacagattttttaggattataaccttctaggatgaaatcaagcacttttgtagaaatataaagtgaaacaaccgtaaatagcatattttcaaaaccaataacaaaaacagaagggataacgacaattaaatcaaagaataatagcgcataactagtattccaacctaaatatttatttgctatttttgctaaaatagcacttccagcagtagttccgccgccgttcataatgagccccataccaattcccatcattaaaccagcgaaaatcgctgccacgatagattggcttgcaacaaaagcaagcggttcagaaaaatgtaagaatagcgaagtgaaactaatcgcgacaatcgtccaaacaatcgtcatgcgatccaaaaacttataaccaataacaagtaaaataccattaaaaataaacgtcgtaatcgctggagtccaaccaagcaagtagtaaagcatcatcgttaaccccgtaacgccgccttccccaagattattagggattgcaaaaacattgaccgcaagcgagaatataagcgctccaacaataatttttgcgatgttccaaccagttttatttttcatatccatttctcctttccacacaaaaaaagacccaagaacaccgcgaaatcggcactctggagtctttttataaaaaaagcattaactgacatctctgtcattaattgtctcaccataaaaaattgctattcatttcaacacaatttacaatataccataaaaaataagctgcttcaagcactattaagtaaaaaaattaaccgaagatcgctaagaatggcattaaattaagtaaaaataaaccaacaagaacactaataacaattttgatgacaagcggtttttcactttctgtttttttcaccttgattccctccctattagatgcttactttgcccagtgtacaaattcattttttagtggcatataagtggcagtttttttcttataaatctgataagcaaataaaaatccaagaaatgctggaacgataattgcgataatagttaaaataactttagtcatagaaaatacctcctcttaaatcaaaacaaaagaacaaatcttactactattagtgtaacaaatttcacgtgattttggtaataaagcggactagcaaatttcggttacatttatctgcaaatatgctacaatagcggtgggtgagttaatttgaataaaaaaaataagttttttgacatttatttagaattagagcaagatattacatccggcgtttatccagcaggcacactacttccgagtgaaaatgtcctggccaaacgtttttcagtatcccgtgaaacaatcagaaaagcacttgttttactacttgaaaacggctgtattcaaaagctccaaggtaaaggatcgattgtaattgatagggaacgatattcatttccagtttcgggattaactagttttaaagaattacaaaaatccgaacatatgaatgcgaccaccaaagtaattcgaaacgagcgagcaaccttgccaaatcgtattgctgatttcgctggtcttccgcgtggatcatcttgtttagctatcttgagagttcgttatttagaaggagaagcaaccattctagactacgattatttattagacaataccaatccgattgaaaccgagattttagaagactctctttatcagtacttagaaaatgaaaaaggctatgaaatcagttacgctcaaaaagaaattacggttgagccgctgaatgcagaagataagaaatacttagcgctccacggtgacactcatgtggttgtcgtaaaaagcaccgtatttctaaaagacacaactctttttcaatatacagagtcacgtcaccgattggataaatttcgttttattgattttgctagaagacgttaaaaggcccgagaaatattcccgggctttttttattgaattaaagttaatgtttcataaggcgataactctatctcagcactaatttctttacggtcataatttgatagtaatatctttccgtccgaaaattcttttggaagctgtatttttttctttgtagctccaaagtaatgaattgctagtagcgatgcagtttcatttgaacgcttataggcgataatcgaatcttcctcggtcaaatatggcgtataatcaccagtttgaatgaccggatattctttacgtaaagcaatcagtttttggtaaaagtagaaaatgcttgttttatcggatagcgctttttgaacattaatttcattggcgttatctgctacttttaaccaaggagtgccggtcgtaaacccagcattgttcgaactatcccactgcattggtgtccggctattatcacgcgaacgttctttaataatagtcattacttcttgttcacttagcccgtttttgtgtaagatgtcaaaatgattgagtgtttcaatatcgacataatcatcaattgtagggaattttggattcatcatgccaatttcttctcccatatatacaaagggagttccacgcataaaatgaattgtcgcaccaagcagggtggcagagtgataataatgttccggacgatcagaagcaaaacgcccaagcgctctaggttgatcatgattattccaaaaaagcgcatcccagccattctcttcagacattgcgacttgccacgtatggaaaatcgatttcaaattagcaaaattcacatccgctaagcgccatttttccccatcaggataatccacttttaaatgatggaaatgaaataccatcgataattctttttctttcgggtcgctataacggatacaattatcaatatcagtagaagacatctccccaacagttacaatcggcttatcaccaaaagttcgctcatttaactcttttaaataggcgtgaatgcctggcccatccgtgtaaaaacgacgaccatcaccttcaaaatcatcttctaaaaacttaggtttcgcaataacgtttaacacatctaaacgaaatccttccacacctttatcaatccaaaagttcaccacatcaaaaagcgcttcacgtacatttttgttagcccagtcaagatcagcttgagtaacgtcatataaatgcaaataatactcagatgaattaggtaacttttgccaagcacttccgccaaatttagactcccagtttgttggcggagatccatctgcttttgccggacggaaataataaaaatcacgataaaaagggtcaccagcgagagcttttttaaaccaagggtgttcggttgaagtatgatttaagactaaatcaatcataattccgatatttcttttctttgcttcagaaataagcgtagtaacatcattcatagttccaaataacgggtctacagccgtataatcagaaatatcatacccgttatcattttgcggagaaggataaaaaggattaatccaaatcatctcaattccgagttcctgtaagtaatcaagcttagcggtgataccaggaatatccccagtaccatcgccagtcgtatcaaaaaaagattttggatacacttgataaatagttttttgagcaaactttgtcataaagagaagcctcactttttaattggttgatttagcagaaccacgatattcttttttaccaaaagttcgaattggagcagtatctactttgtttaaaatattatatttgcggaataatacagttagaacgaatggaacaacaattgtaatcaacatacatacagcaaagattgcatagtatttaggattaattgacaagattccaggtaatcccccaaccccaatggagttagccataacaccactagaaacggaaacgacagctgcaattgctgatccaatcatggcagcaacgaaaggatataagtacttcaagttaataccaaacattgcaggctcagttacaccaaggtaacaagaaatagttgcagggatcgaaacctgttcttctttttcattaccgcggtgaaggaaaataatagcaagaacagctgaaccttgagcaatattagataaagcaatcatcggccagagatttgttcctttaaattggctcattaattgtaagtcgatagcgttagtcatatgatgcagtcccgtaacaacgagcggggcatataagaagccaaatagggcggcgaacaaccaactcagtccaccagttaaaccagcataaacgacatttgaaatcgcgttaccaattttccatccaataggtccaagaatgacatgagcagctagaacagttggaacaagggcaaagaatggaacaaaaatcatcgaaattgcatttggaataaatttacgtaaccagatttcgagataggctagtaagaaacctgccataattgcaggaataacttgtgcctgataaccaatcatctgcacttgagcaaagccaaaatcccagacaggaatgtcgccagcttttgtttcaacaacgctgtaagcatttagcagttgcggggaaacaagtgttaaaccaaggacaatccctagaatttgagttgtccccatttttttcgcgattgaccatgtaattccaactggtaggaagtggaatacagcttcaccaatcagccataagaaactataaacaccagcccaaaatggatacacatcaacaatcgtcttagtaccgtcttctaaaaacttaatatcaccgataacattacggaaaccgagaataagaccaccaacaacgattgcaggaattaacggtgtgaaaatttcagctaatccggcaagcaaacgttgaagtaagctcatatttttcttagcatctactttggcatcctctttatttacaccttccacaccactaatttttgtaaattcattataaaaaatagctacatcattacctataataacttgaaattgcccagcttgagtaaacgttccctttacagctggaatgtcttcgatagcttccacgtcagcattatcagggtctagcaaaacaaaacgcattcttgttgcacaatgtgtaacagatgaaatattttctttgccgcctattaattctaagagagcgcttgcatcctttttatagtcaaccataaaatttcctcctttttaacttgtatatacaagttattcgccattactatactataaatcagttgaaagcgcaaccactttatttatgctaaaattaaaaaaaggagagaggtttatgaaacatataagagtagcagcgattatcaggcatcaaaacaaaattttactccacacaactaagaatgaaagttattggacattgccgggtggtgccgttgaaaacgagttaactaacgaaggcttacagcgagaaatgagagaagaacttggagaagaagtgattattcgcgatttaaaaattatcgcagaaaatcgctttgtatatcatggcgaggaaattgatagtattgagttttattatgctgtggaattatatccaaacagctcactattagaactttcgacgtttacaaaaatagaacagtttgggcagtacggggagacaggttacgagttaaattttaaatggtttgaaatagacaaggtgagtgaggtagaaatattgccaaaattcctccaaacagaactagctcaactttcaagtgatcgtataaaacacattcaataaacagcataaaaataccccgcgaaatataagtttcgcgggggttcatttaattagtcaaagatactaatgtaatttcttttttgctaaggtctaaaaatggtaatttaacacgtgtatctaagcaatatgcgttgtatagtaaaggttttaaagtcgttgtagagctctcgacttggcgaacaaaattaccaatttcttgatacaaaatttcaatattttttagactaccaatttttgaatcaatgcggttttcactaacattcacattggagttcgttactttttcattaaattcatcattgatagcatcttttgtacgttcaattcttgtaaaacgagtatcttcccaatcaatctcaatgatatggcaatcgtcaagttggaggaagtcacctgtccacagttttccgtcaatttcaacaatcattcgcgtatcggggaaaacctctttgttacggtatttttttagtaaataatcatacatttgtaattgcgctaaacagttatccatgtgtgtcatctccttatgggtttattatagcacattgtgattatgtgaacaatcaagttaagataaatgaatagttggaactgtaactttttaactagttatacaaaagtcctaataaaaggcagtgaaatagtgaaaataactgccagatgttatactaatattaagatgaaatgggagggagacacatgtacaaacaaatgaaattaaaagcgacagatgggttagatttacatttacatatatgggatgaagttgaaaatccagttggtgtagttcaaattgttcacggcatggcagagcacggggctagatatggcttgtttgctgaacgtttgaatgaagcgggatatatcgtagtagcagacgatcatcgtgggtttggaaaatcagctatagatgaaacttatttgggtcatttagacggcgaaacaggttttcaaaatatgatacaagatgaagtagtcgttcgaacttatttaaaagaaacttatcccggactgagctattttattttcgcacacagtatgggaagtttcgtcatccggacttttatggcgcaacatcaagttgatggagtaatactgagcggaagcggattacaaccaatccctctcctgaaaatggggcaaattataacgaaacaacgggtaaaaaaagatgaaatgaaacgaagcggatttctaaataaattagcattttggggctataataagccgtttaatgaaaatcatcgcttcagttggctttcacgtgatgtggcgatttatgaagcttatgagaaagacccgttttgcggtccagtagtgggaacgagcggatttttccataatctttttgaagccgttaaaataagccagcaaaaagaaactgtcgaaagtgtgccgaaagatttgcctattttattactttcagggagtgatgatccggtaggccattttggaaaagatacgcctaaaattgcattagctttagaagcagctggagtggaagatgttacctataaaatctacgaagatgcgcgccatgaacttgtcaatgaattatgtaaagaaactgtttttaaagatgttattgcttggttgaatacaaaaaacaaggaagcctaactattaggcttccttttcattaattacggatttgaccgtccccgaaaataatatatttagttgaagtaagctccgttaagcccattggacctctggcatgaagtttttgagtactaataccaatttctgcaccaaatcccattgcaaaaccatctgtgaagcgagtagaagcattaatatatactgccgcagcatcgactttttggtgaaatgcttgtcctgttgcataatcattcgaaataattgcttcggaatgttttgtcccgtatttattaatgtgattaattgcttcatctactgaatctacaactttaatggccaaaataaagtctaaaaattcatcttcccagtctgactctgttgctgctttagaatcttttagaatttctcgtgcgcgttcatccgcgcgtaattcaacgttatattcctttaaagcggtttccatttcaggaagaaaggcttctgccacatctcggtgaataagtaaggtttcagctgcattacaaacagaaggacgcgaacattttgcgttcactaaaatatcgattgccatttgtttttcagcagctttatcgacataaatatgacaatttcctgtgccggtttcaatgactggaacagtagcattttcaagaactgtttggattaatttagctccaccgcgcgggataagaacatctaaaaagcgatttaaacgcatcatatcacgagctgtttcacgagatgtgtcttcaattaattgaacgctagaacgagggaatccagatgccgctagtgaatcctgaataacggacataagagccttattcgaatcaattgcatcactaccaccacgtaaaataacagcattaccagttttaaaacaaagtacagaagcatcgactgtaacgtttggtcttgattcataaatgatacctataactccaagtggtactctcgtttttccaatagtgagttcggcttcatttttccacatatttgttacttctccgataggatctttcaaagcaacaacttgtttaaccgcgtcagaaatttcttttattctttcttctgttaaacggaggcgatcaatcattgtttcaggtgtccctttttcccgagcacgtataatatctttgttgttttcctgtagaagggaagctgtatgggcaagtaaatcattgcttagatttagcaaagctgcatttttttgcttagttgatgcttgcgctaaaaattgggatgcttctttagcggcacttccttttttaatgagttccgtcatgggaaaattcctcctttttacttgcaaataaagtcccaacttgttcaccttgcattatatcaaaaataattgtaggatttttgccattggttaaaatcattttttggttagcattcatacaataagaagcagcggaaagtttcgttaacataccgccagttccgaatttagaacctttaccgccagcaagtgcttcgatttctggtgttatttgattgatttcagaaaacataactgcatctgggtcagttgaaggattactaccataaaagccatcaatatcagatagcatgataagtaaatcagcttgcacgagtttagctacaatagctgaaagaaggtcgttatcgccgtatttagttacatgttccagttcttcaacagcaactgtatcattttcatttacaataggaataatgccgcgttctaagagactttcgagcgtgttcataacattttctctactaatagggaagtcagttacatctcgagtaagtagtacttgaccaacaacttgtccgtattcaccaaaaaacttactatatatatgcattaattcactctgaccgacagaagcaactgcttgttgttcgggaatgcttgtaggtcgcactggaagttgtaatttatgacagccaacgccgattgccccagaagaaactaagataacttcttttccttcattacgtaaatcggataaaaccatcgctaatttttcgatagttcttaggttaatatggccatttccatacattaatgtacttgtaccaaccttgataactaatctcttgctattttttaaagattcgcgcatttctatgacccctctgctaattagataatacttctattttacatgaaaatagagatatgtctataatatattgttgtttggtcaagtaatcactaaaaaaaggattctaagaaattgtcttagaatccttttttattattttgtagctttactcgcagctgagatgactgaaacttgttttaatcctttgcttattaggcgtaaaataacgaaccacacaattacgattagaacaatttgtttaaacgcaatggctggtagtggattgaaaggacaatcccaaacgaaatgtaaagcaatcggaataataaaccatttccagaaagtgcctgtgaaaatatggttcattcctagtttttgatctcctttagcaattacaagagcggcaccagttattgcagcccatacaacatgaccaccgatagactgccaaccacgactaaagataacattcatcattgtttcaccagcaatatgaatatccttgaataaaaatgctgcatcgacactatagttaaatgcatagccaagcgattcaaaagcagcgaatccagccccaacagctgcaccaataagtaagccgtttaggatatatttcgaattaagcgagcggatgaatagggcaacgataatcatttttccggtttcttctataaaaccaactaataaagcattaaagtagtttaatttcccaactggaataatcgaataaatgacaagtgttgcaacaagcgctgcgacaccaccgatgaaaaacatttttacaacatcaaaaacgctgatatttcgcggtgcatttgtttcgaaaaagaataataagaccgaaaatggaactgcaaaagagccaataaccatcagcccaggtatggtattactattatcaaacaaatatgtacaagcaagaagtaaaaagtacgtaatgattaaaactaagaatactctagaaaacacccatggatgaggccaagtatggggaatgtcactagttgcaggcgtcgtatattttgtccctgcgataaatactttttcgccttcctctttagagtgctttttaaacacagcagagaaaagatttccaatttttaattctgaattcccgtgatttaacgcatgttgatgtaattctgtttgtttaaatgcgacccactctggatgaggggatttttggaccaatgttaaatcattaatctctttctttttatatagagctatcatctctacattagtaaaaggcccaactttctgttcgttctttttgaagtaccattctgacaaatgaaactccccctttaactttttagtttgactctgttaattattcccaaaaaaagtcaaagttaaacgggtgatgaatttaatcattaagttttttcgcttgttcatataggaaatctatcgaatcagctagaaaatgagcagctgaatcattcaaaggcttgccgtttaaattcaaatcatcttcatatcttaaatcttcactaatttttatcattcttttagcaatatctttctcaccttgaagttcactaggagcataagtaggaatactttgctgacctagtaaataatctacactaacatcgtaaagtgttgcaatttgtgtaaccatatctaaatcaggttcgcgaataccatactcccagttgccgtaagtagaaggtgctttcaaacctaatcttcttgctgtttcagcttttgaccagccttgtttttctcgtagtaatgtgagtctattacttaaatttggcatgatttcactcctttttgtttgattatacaataaattacacaatttagctataatttaacacaaagtgaattattttgcaattgacaacctcttatcgagttggtattattgtattaataactcaaactgtgtagataaggagaagatgacatgaaaacaatagacagcagaaaaattaacacggccaaaattcgggaattacgattagaacggggaataacacaagcttttattgcaagaaaaatgggttataagtacacatcaccatatttgacaaaaaacctataaataattcttttgattgactgacaattatttataaaaaacttattttcgttataaccgctttattttcatcatcttttacatattcaattccttcaataaacatacttataaaatctgttttttcagtaggagataatgaagtccaatttatttttagttcacgaagaatgttatttcttttagcaatatcttcaggagatacaaataatgatacgtcatattctttttttctatcttctgcagcatcaatctccatttttgtatcaatcattaatttagaaaattcatcatcattcataaggtcagcagcccatgctttctgaaacttttcacgttttctttgaagtgaaataatttctttttgaatcatttcttgttttctcaaattattatctaattttttagaagagatatttgctttattgagtgtatagtttgaaatataatcaataaatgctttctctattttttgctcgcttatctgtactgctggacgtctatgttctttgcaggtagcacaacgatagttattgttataaaaagtttccttatttttatttatatattttgttcttaatccagataatctttttccacaagctggacaaattaatctatttttaaaaatgtgatgaacgtgtccacgacggcttgttgttgatttacttcttattgatagtattttggctactttattaaatgttgccttatcgattagaggctcatgtgtattttcatatatttcattattccattttatcgctccgtagacagcaggattttttaacatccaaattaatgtagatactttccacacatcatttgaacgccttgttttcaaaccaatatttgttaaatattcacaagtttgtcgtaaagaataaccggttgaaaccatttcaactacttgtaaaaatatttctttttctattttatttactattagttttccgtcagtccccttagtataaccgaagggagcgagaggaatatattctccttgacgcactttctcagccatcccaaagctaactcgttcagaggtattctctctttcaaattgagcaactgaacttattattgtaataaaaaatctgcccatagcggaagaagtatcgtagacttcagtagcgcttttaaatgcacagttaaattcatcaaatatacttaataaattatgcaaatctacaacggacctagtaagacgatccaatttatatactaggactgtgtctataagtcctttttttatatgtgaaatcatttcttgtagaagagggcggtgcatatcttttgctgatttaccttcatcgacgtaaaacttgaaatcttcccatccttgcgctgtgcaatatgcttttaacttctctttctgtgctgatatagaaaagccttccttcacttgttcttcagtggaaacccttatataaatccctacagtcatgaactttctcacctccaaagagtacatatgttctgttttgagttttaaagaaaagcccaagaagggcaaatcattattaaaagttgaattcttttttttcagaatcgtgatataaagtgggttctttatcatcccaaactttactagatatgattgttaagttttttagttcatcggcttttccgtaaaaaggaacaacaagataaccagttttttcaacatttcccttgaaagtaccaacgcccataacatccaggctagtccaactctcgttagaaacatctatttgttgtttagtgttcgtaattatagtatctattccgtgaaacataatttctttattaggatcagtatcctctgtttttaagctgatttgtatgcttagatagttctcttgttcttttccagttaattcttgatactcttttttcacatctgcattcaaatcataatgctcaagcaattttatatctaaaatcctcatttgtattggatctaaatcaaacaatgtatttggcgtaataattttcagtaattttattttttccccatcgtcatttttccattgattaactttggttaagggaccatccttaatataattttcatctttcttagattctggcttactatatttttgttcgtcttcgttatcttttgtagttgtttctgaatcagttgttgaaccacagccaatcattagtactccaaaacaaactattatcccgcccagtaaaatttttttcattttttatgctcctttttttattctatataagcctattcagaatcataaattaataaatctttccatctctattggtattcctgaaaaaaggcaaatatcacgctttgtttcaaacttatcgagttcaatctctgaaagcaataaattaactgcaaattgatgagcttccacttcaattttacttaaattagaccaatgtattgatttagtaaacgtcgcatttaatcgtgtatgtaatacagcatgccctagttcatgagcaactacatacttaacctgataatcagaaagattactattatagaaaataaatctgtttctgcgaacatacttgtagaaaccatttgtatcatttgctaaattccatggtgtaacaattatattaagtatttcgcacaattcaaatggatcagatgtgtggtgtttatttctaagcatttccagcatctggtttggccacatatagaatacccccgttttactctatattattttttttgtctttaggtgcgtactttctattgatacgagttgcttgtttttcagcgaattccattgcatctaaaatactttccatagcttctgctgtaatcggctcaccatcataaagtaacccatctccatttttcagatcttctttaagtgcatccattctttttttcatatctatttcttctttgagagtaaaaccctctgcatttatatttttatggcggcttctgccatgtaaataatctaaacttacatcaaagtagttagctattttattttgaatctcagcatcaggcattcttttagattgttcataagaagcataagtagtctttgctactcctaatattttcgccatatcagcttgtgtttttttactttcttttcttagctctttaattcttaatgcgaacatatgtgcacctccttgattcgaattatactatacaaattgcgtactttctatttcaaataaaaaaatgatacaaaaagagtatttatctattgacataatacaaaatgcgtattattataaaggtacgcaattcgtactacttagaaaggagtgctaaaaatggagtggttaaagaaatatagattagaaaaagatatgacacagcaagaagtagctgaacagtgtggtatacccaaaaccacatatgcatctattgagcaaggtaaaagacggccatcgccagaacgtgcgaagttaatcgcaagtaagctgggattcgactggactattttttttaacaactaagtacgcgatatgtattattttaacttaagtttatgtatcacgcggaacaaaaatgatacatcggaaaggagagcatgtgacagtaataaaatcttcaattaatgcatccaaaataatgaaatatactggcgaactacctcaaaaacaattggcagacttacttttaacaagtagacctaatgtaagtcatatacaaacaggtaggcgaaagatgcagcaagatatagccattacagcattaaataatgtacagagtaatttattcaaattagcgctatcgcatgaatttactgaattggttccagacgttttttccggacaatacgtgaatcagaatccattaagtttccttgtaatgtatgaacaggaagccaacgaatttagtgcaaatattgatgaggtaatgaaaattcttgttaaaccagctaatcagctaacaacaaatgaacgtgtatcagctagaaataatttaaaagaacttattgatgtattgggctggggctataatcttttattttttgcaagtgattatttaaatattgatgcttataaattaattagtgaacaagatgagtgttggaaacaaaaaaaatggatttgaggtgttggaaatatgagcaaagtttgtgataaagaaaatgctgtgaaggttgaaatagtttatacggaactaactcaagagcaagaacaagcaatgtttaacttctttaaaagccgctcttttccaagaattataaaaaaactagaagaagaggagcgaaaaaaatgttaacagcagtattaatcacactgagtcttggaattgttatgaatatagcgctttatgcgtatcagaagggttgggaaaagaaaaatgtcgataccgatttggatagcgataatctggatactcgcactgctcggaacaatgtccgtaatatcaagcgctaagaagttgtgcaagacgataaaaaaagttggcttggctaactggtatgaaagctggatttacaaatgaatataggattattgtttgttggatttggagtgtttgtagcattgatagtagcttttaaaagcgaagaaggaggatttagaaaatggaggaaataagaccactgaataaaagaattaagattgaagatactacgtatatcgtgattttaacacctattaatgataagagcggaaagaaaactttcaagggaatcatggtagatatgtccttagacggtgaacattttgctagagatagatttgcttcaaatgtagacaccggagttattcaaaattggatgttgaacatgcataaagcatcgcagaaagttgaaagagttcttgaggcttttgaagagtgggatggtgaattgaatgagttctggtgattcaacgagcatcacgattgtagaaggagtaatgattgtaacgacaaaaaaataaactcgtgcgctaacacgagtctgacatagatagctattcgctaaatataagagttgaattacttatagtatatgcgattagccccgttttgacaaattaatttttagaaaggggtctttattatgcaaattaagactaatgagctcattgaaattttaaagaattcaagaacccactcattagaaagggtcaaggctttagagattaatttattcaagtacaaacgattaaacacgaaaccaccggcacaactaactgaaaggattgctaatcacgagaagaagattgaaacaataaaaaaattagaagacgaattgaagcaatcagaaaatgaagtttgtaaattttaaaaattggaggattcaagatgacacaaaaaagtattgaagaagtgaaatttgaagaggcaaaaaaattaataactgggttacaagcaattgctacatttaatgaaagcataacttgtgccgtgaatgtaagcttcaatgatggaaaaggtatacacagtgcgtcatctgcaattggagggaaaagcgaactcttaaagatgtatggggacatcgccgaagcaattgtatatgaatttatgaaagaccatgattgtgtgtgcaacgtgaatgaaaccattgaacatgcaatagaaggggcattaaatggatttcaaaatttcaaacaagatgcaaaggagaaaacagatgaaaacaattaaattgctaaagcttcaattagaaaattttaaaggtatcaaggaactggaaattgatttcgaaaacagtacatctatctatggcgcaaatgcctcggggaaaaccactatcatagatgcatttacgtggcttttattcgataaagatagcacaaataaaaaagactttgctattaaaacattagatatggaaggtaaagttattcacaagttgaatcatgttgtaaccgcagtgattgatgttgatggcgaacaagttgagttgtctaaaaagtacatggagaagtggacaaaatcaagaggaaaactagaacaagagttaacaagtcatactacagaatattatatcgacgagatcaaaaagaaagcgaatgaatataagtcatttattagcgagctactagacgaggaacttttcaaactaattactaaccctctttattttaatgagcaatttgactggaaaaaaagacgtgcaatgctaattaaaattgcaggtgatgtaacagacgcagaagtaacgagtgcagatgattcactgaaagatttaagcatctttcttggaaagcactcgattgaagataaattaattcagattaatgaacagcgcaagaacttgcgtaaaagattagaacttatccccgaacttgtaaatgaagctactaaagctaaacaagatgtaaccggcttaaatccaagcgatattaaaggtgaattatcagtaattgaagaacagattcaatttatcgaacaagaaaaaaatgttctgaaaaacggtggtatacaaactgagcttaataagcaaaaagcgaacattgaactggaacttacaaaaatcaaagcaaatgagcaaaaagaaacacaagaactattaatgagtaaaaaagaagaaattttcgaagaaagaaatgaacttatagatgtaaataaccggattggtgaatctacttttcttattcagcgtaaacaaggagaaattgcaactaagcagcaagaattaactaaattaggcaaagagtgggacgtattgcaggtagaaaaatttgacgaacatcgcaaaaaatgcccgacctgcaatcaagatttcccagcagaacatttgagttctatgattgaaaaattcaatcaagaaaaggcagaaaaaattaaagaaaatgaagctgcaggaaagtcaagtaaagcagtaattgaagaaacagaaggtgatattgctgaactttcgtttgatattaaagcgaatgaacttgaattgaataatattgaatcaaaattagagattttggaacaggaaaaaacagctttagaacatcagctggaacaagctgaaaactctactacttacatcgagaaacaatctgaactggaaatgattgaagaaaaactgcgtgatgaaaaaggttcttctataactgcagtagcagagattcaaatcaaaattgataaattgaatgctgaagcaagtgatttaaaagctgatttagcaaaatttgatagcaatcagaaacaagaaaatcgcattcaggaattagaagaagaagcagcagaaaaaggcgctaagtacgacgaattggaaatgggattatatctcattgaacgatttaataaagcaaaatgtaatcttcttgaagacaagattaacagcaagttcaaatatgtttcattcaagttatttaaaacgcaaattaacggtgggattgatgagtgctgtgaaacgatttacaacggtgttccttacaattccggattgaacaatgccgctagaatcaacggtggtttggacattattaacgcactaacagagcatgttcaagttagggcaacgatatttgtagataacagggagtcggtaacggaactaattgatacagaatcacaattagtaagcttaatcgtttctgagtcagataaaaatttgagagtggaggcatagaaaatggcaaaagagaattatagcgacccaaacggaaaattgctcaatagtataacgacatttgaagtgaatggagaagaagtaaagttatctggcaatattattagggattatctagtaagtggaaatgcagaggtaacagaccaggaaataatcatgtttttgcagttatgtaaatatcaaaaattaaatccatttcttaacgaagcctacctagttaaatttaaaaacacaaaaggaccagataaacccgcacaaataattgtttctaaagaagcatttatgaagcgtgctgaaacacatgaacaatatgacggatttgaagcaggaattatcgtcgagcgtaatggtgaagttgttgaaatagaaggagcagtttctctagataaagacaaattactagggggctgggcaaaggtttttagaaaagacagatctagaccagttagtgtaagaatcagtgaaagagagtttaataaaagacaatcaacgtggaatgctatgcctcttacgatgatgcgtaaaaccgcagttgttaatgcaatgagagaagcatttccggataacttaggcgccatgtatacagaggaagaacaagggtcgctacaaaacaatgagacaagtgttcaagaagagattaaacaaaatgctaatacagaaatgctagatataccagcacagcaaattgaagtgccagattttaaagaaataagagagccagagcatgtggaaatgccaccgatatatgatgagcagccatctacaccgccagctagaccttattaatatggaaattaagacaattgcgagtggaagcaaagggaacgcctacgttattagtagcgggcgctcccaactactaattgaatgtggagtaaacttcgacaaaataagaaaagcactaaattttgatttatcggcagtggaagcctgtttaatcagccacgagcatggagatcacgtcgctggcgtcaaaaagatgttacgcacatccagcattaagatatacgcatcagaaggcaccttgtctgctttaaatgttccggacagtcgacaattcattttaaaagaaaaagacgctcaaaacatcggagaatggattattttaccgtttcaaactgaacatgatgcaaaagagccgcttggttttatgattcaacgccataatgaaagactacttttcattacagacagttattttgtaagatacaaattcaaaaacatcaactatttaatgattgagtgtaactattcagcagatattttagaagaaaatgtaataaataaagttatacatcaagttcaaaaaaagcgtgttttacaatcgcatttcagcttagaaaatgtaaaagagtttttgaacgcaaatgacttatcgcaactaagagaaattcacttgctacacatttcagagagaaatggtgatcctgaacgatttaaaaaagaaattcaagctatgaccggcgttccggtttatgtataggtggtgatgatatggcaaggcctttaaaagaggggttagattattttccgttagatgtagatgctgattatgatgataaatttcaattaatcgaaacgctacatggaccgactggttttgcaataatgatcaagttatttatgaagatttatagtcaaaacttttactataagtggacagaaacagaacaaatactgttcgcgaaaagagttaatgttgacattaacacactgaaaacagtagttaatgactgcattaagtacgatttgttcgacaataacctttttagtgagtttcaaatattgacaagcctaggggttcaagagagatatttcactgcaattggtcgaagaaaaaaacaaatagtagtactagagtacttgttactagataggccagaagtaataaatttatgtcctaaaatcgtttttgcaaacattaatgttgtaaatgatgacattaacgcggaacaagaagagttaatgccagcattaagtgcacaaactaaaggaaaggaaagtaaagtaaatgaaagtaaagcagtagtaagcgaacaagaaaaactccctgaaaaaattgtaaaagaaaaaccaactactactgcttataaattttgggaagaaaatgttgcaattaccggattatcggaattcgatagagaattgctaaaaaaacttatttctctagggggcaatgagttaacggtacatgctatgaagaaggcaattgaactgaacagacgcagaatgaaaactgttgatactgttttgcggggttggttagataatggagttaaaaccaccgctgaagcagatgaacaagaaaaaaactggaatggtggtgctaaaaagaatgcgcgagcagaaccagcaaaacaagaaattaaaatcagcgaccaatataatttcggagctacaagaacggattgatagacatacgcttaccgaagcagatgagcaaaaaatccgaaaacagattgcaaaagaagatgccgagctggcagctaaagcacttgactctgatagaaatcaccagttaaacaaaatattttctaatagcatgattaataaaaagcttgaaaatgcgagttttgaaaactatcacgcagagaacgaagagaatgcaaaagctctagcagtttgtagacggtttgtagaaacgtttaatcttaatcagcctagaagcttgctactaacaggtgcatatggtgttggcaaaagtcatttagcggcttccattatgcgagatattagtgaaatagatattgtactaaaaagagacaatgaacgtgatgtcgtgttaaagacgagaaaaccaacgatgatttttattaacacgcctaagttattaacaaaaattagatcatcttttagtaagacgagtgagtttactgaagcagatttgttaaatgaaatcgaaagcgtagacctcctggtcttagatgattttggaagtgaaatcaaagaagcaaataacgattttgcagtacaaaagattttcgaaattgtagaaggccgtgttgggaaacacactgtttatactacgaactttaacgtagatgaactttttaatttctatggagaacgtaattttagcagaattatggaagatggaaatttaattcaaatgtcaggagaaaattatagattgcgaggatttaaaaaatgatacttactaaggaaatgccgaaatatgtcggatttgatggaccatcgccagtaaatataatcatctggaagctattagacaagaaaatagcgaaaacggtatgttacacggccgaagaagtcgaagagcagctaaagctacacgcatggaaatttgatggatatgaggtcttatctaatgcagatgaaaacttttaaaatttggctaaaaatttactgggtttctggcctttgtcaaaatagaagctttgaagtagaagctagaactttcaaagaagcatttgataatgcagaaaaaaaggtacctcaagaaaaagtgaagaaaataaaacatttacagggagatatcgtaggttacatttttgaaccgccaaagagaggagctaataattttgaaacgaattgagtacgttgaaatcattaaaaaaattcccgggacaccttttagattaggagggatatacgaaatagaacgagtgggttcagcaaatgcacgtgtgagaattaacaacagtatttaccaagttcctaaagaagcgctaaaagtagttgaacaagtggaacgtgaacggtgggaagaaaatgataaaattcacgattaatattcctccacatccacaagaacgaccgcgttttagaaatgcaggcaatttcgtacaaacgtacgacccgcctaagtcaaaagagtacaaaaagaaaatagcaaatgtggcaaaaatgtatgcgccaggaacgccaataagcacaccaattcaaataaaattgatattctttgtgtctattcctaagtcgaaatctaaggcttggaaacagcgagcattgctaggacaagaatttccctcagtacgcccggacattgacaactacgttaaagccattttagatgcgcttaacggaattatgtttagtgacgatggcaagattgttgaattaatcgcttataagagatattcggacttacctagaacagaagttagcataacagaattagtttcagaagttcaaacaaaattattttaaaaaaattggaggaaaaaagaaatgattaattgttacgcagaggttagaaatgtacaggtaaaaccaaacgatacggtggaaattaaactagtagtagatgtagatgaattatctggccaaaacgaagaacttatgaagctagtaggtagagaagtaaatacttcactcgaaagcaaccaaatatcttaccgtgaaaaggttgacccagaaacacgagagccagttcttaaatatatggtccataaggatggaactgtggcgatgtactcacaagaaaaacttgatttagaactagaagaattacccgcagaagaacgttcaagcgtaattaataaatccgaaattgatgaatatattcttgcttgtgaaggaatcgcgatgacaatacctggtgggatttttgaagggaaagaagtacttcaaaaattatcagagggtgaagacatagaggatttggctaggttttatggaactccggttaaagaaatgcaagacactttagatgaatatcgtaaattcgtagctgccaaagcaaaagcatggcaagactggaaaaataactctgaacaaacagctgatagtgaagaacaagaatctgaaaatgatggtcaagcaactttagagtttgaaaccgaagaataaaatgctgggcgggaaaccgcccttgtaaagaggtgaggaaatgccatcagaagaattaaatttattcgatttaatggattactatcctgagcagtctgctaaaaaaaagcgaaaggaagaagccttaaaaccgattaaaacacataaaaacgatagattagattatcctacagcaagagccgaaatagagcggattttaggtaagaaagtaactacagtttgcggatattacgatcacccaattaataaagaaattcgatggatattcaatttagaaaaaggatgctgctacattaacgataaatgccatttgtattcaacagaagaaggaaaaggatacaaatatcgcggaaaagtacacgaggaggttttttataatgcagacgatagaaaaagagctactacaacgattgagtgagagaagaataggggttcaacatcagattgcttcacttgtgcatacagagaagtgcacgttgctagaagcattaaaaatgacagatacagaagtcgatttgacttttaacgagatgcggatggagttagatagttaggaggaaggataatgacaactattggaatgttaagcataaaagagcaagcactcaataaaatgttaacggaaatgaatgagaaacactcaggagctgaagatgcagtacataattggctctgtactcaagaagaagaagcgatttttgaaggtattctgaaagatgatagaagcattagtggggcggttaaatactgctcctcaagggcttcaaagcatcaggctgaaggcgtggccatgattgatgacaaaacggtcttttcctgggtgaaaaagtattttatatcagaaaaagtgccgaaaagtagtgtaaaggctacagttaaaacaactgcaacaaaaccagaaaaagcgaaggttaaagctaaggaaaaaccgaaaaaaacaactgcgcaagaagggtatgagcaattagatttgcttgatttcttatgaagagagaagcacgaaattatattgataataaattaaagccaccaaaagccttttttgactggtgtttctcacaaattccaacttacaaatggtccaacaaaaaagaaactattctagcttccaatcgaaaaaactgcagtgttattgaacagaagttaagaaaaaattctagattgacattttttggtaaattgaacgtgttcggtattgtcttagttacatcgaaaagaattgagatacaaagttacgcgttctggaatcgagtagtggaaggaaaagaaatgattgaatttgatctagtcaattttgaacaatttgctgatggagaacacgtaaaggttgccatcagcgacggcaagatgtggtttggtttaattccaatatatggtgggatgtctggaggtccttactcaatgattcgattgtttgaaaatgactggaaagaaaaaattcgaagtaaatcagagcttaagtacctagaaataccgcacttagactttaaagaaattgaaactatatataaatatagagttgaaattgaatttttgcagaaaattaaagcaagacaattgtccaaggaagttatgtatcccgtaacacaatatacaaatggatcgtttagaaaaacggtagatatgcggacaattaatgcgaagtggttgaaagaaaacaagcctttctttaagaactcggacagaggttttatggaatttgaattagcaagaagaatacagaaacggcgaggaaaggtagtttctggaattgaaaaatatcttgattaccgtgctatcaacaaaatcccagaaggagtaggaatagttcgctttcagaattggatcattaagaataaagtggattttagctactatctggattatctaaacctaatgcgagacttaaatattgcaatcgatagcgaaaacataattatgcctaaaaatttagtaatagctcatgataacgcggtcaaattactgtaccaaatgaaacatgaagttgaagaacaacaatataaaatgagatttgagaagataaaagacttagaaaaaacgatagataattacgcttttattgtccctaaacaagcttctgatttattaacagaaggcaaagcattaagtcattgtgtgggtggtagtaattatattaaacaacacattgaagggaaaacaacgattatttttgttcgtgataagcagtacttagaaaagtcattgtatacacttgaatacaaaaatggccaaatttaccaactgagaggtaagcacaattgtgagccaacccacgatgtgcaagaggctgcaaacaactgggctgcatcagtaaaaagtaaaacaaaggtattacaacatagttgaggaggagtaaatatgaaaccggaattaaatgagttaaaaaaagctaattacagaattaggcaagaagctgcggatgaaccgcgaattatccaagtatggtgtccttattgctgggaagaaaacagatttaattttgaggaactcaaaaaaaactatggtccggaaccacgttggcttaaacataaaaaaataacgtgtcataagtgtgcaactgagatggaatttggtgattgctgatggctaagaagaaaaaagaaatactattttgtgattattatgaggactgggttgagacttacaaggtaggagctattgaagacgttacgctaaacaaatattatgtggcagcaagacaactacgcgatatttgcccaaaattattgatgtctgattttagcaggaaagattatcaattaatcatgaatgaatatggaaaaacacatgaaaagcaaaccgctaaagatttccaccatcacataaaagcagctattttagatgcttaccacgatgggttactgaaaagcgatccaacttatagggcggttatcaaaggaaaagaaccaggtaaaaagaaagttaaatttctccagaaagaagaattgagaaccttattgcaatctttggatttacaaagtggcattaataatgattggtttctcctgctgattgcaaaaacaggtatgcgttatgcggaggcattggcgctaactccatcggattttgactgggtaaatgccactgtaacaattgataaatcttgggattataaaactcacagagggtttaaaaaaactaaatcgacggcttccgatagagaaatagctattgattggcaaatcgttgggcagttcaaaccattaattcaagatttgccagctaatgacccgatttttatagagaagacagaacgaggaacatataaaaaacagtataactcaacaatgaacaattatttagaagcgaaatgtaagacattaactataacagtgataagtttacacgcccttcgacacacacatgcaagcgtactgcttgctgaaggtgtttcgattcatacgatttcagcgcgattagggcatgccgatgtaggtgtcacgcaagaaatatacgcacatgttttagacgagttgcaaaagaaagatgatcaaaaaatgatgtctgttttaatgcaaattgcgtagcgaggtgattagatgcgaaaaaattggacggatgaggaaatcagagttttacagaataattacgaatacgtagacactgagataatagctaattttttaaatcgctcatatcattcaataaaaaacaaagcgacgcgacttggaataagtaaaaactcggagtggacagaggatgaggatatttatttaaagtattttgtttatgaaaacgacgacgatattagcaaagctgcagaatttttaggacgtacaaaagatgcagttataaacagactagtgaagttaagaaaaagagattcttcagtttcttttattaggcgtccgtggacagaaaaagaagatgagatactaaaaaaaaattatattattatgtcaaatgcccaattcgctgaacgattaagaagaacgaaagcctctgtagcaggaagaaaggtactgttaggactgacaaacaaacacatgtctaaagaagatgacaaaataattcgtcatcttggaaatcaagggtacacaatcaaagagatctcagcagaaatgaatttgtcttattgcttagttaaaaactatataagaaatcaccgaatcaattatagaagggaatcaaaaaacgggatgaacggttggcgaaaagaggcagatgcgacatattcgctttatattaacgctaaaaaaatcaaggagggccaagcatgattaaatacttcgaatacacaagaagagaaaactatctttatgcattaattaaagcagaaagcaaaaaacaagctgattttatttattggcgtgatgttgttaagtgcgaagaagaatttgcaagaactggactaataacagaattcaatgccgttgaattaacagagaaaaaagcgttaaaactcttcatgtcatctttgcaagaatatgaaacagaggaagaaataaaacaaggtttttatgaaactgtcaacaataaaattttactgcttgattccgatttaatttgagataggaggacgattatatgagtgaaacaactgaaatgattttagagggtattttgtgtaggaattgcggagtattcattgatgatgtaaatccgggatatccgagaacatgcgaagattgcgaggaagataataatgaaaaacggtaaaaagttaactagaaatcaagcgacgatgataaaaagtaatggtcttaatccagaaaattggttagtagtaaaaaatcttaatgatcgaatggaaatagtacatcgagaaacaagaaaaaagcagctaataaaaaaatagctgaagaaaaggttaattatgcattgatggcatattttggtgaaagatatatgaaaagtaatattttcaaaaaactgcgacatatgagtaatacatgtcgcagtaatacaaataatcgtatattaaagattgcttttagtatattcatgaagagtatttttaagaatataactttcttcactatcttttgagtttcttgctgacgcgtatactatatctttagagaaatttggatttaattgaaatacttctttataaaaattcccaagtaaatcttggtaactaataataaccgatattatggatttgtcaggtgcttttttgtcaaagagaataataaatttttggttgggagctattgttgtttcattcaatgagtctaagtcagccctatttttaaaagcgggttctccaataaaacttatgtctttgataattgctggcgatgacccaaaatttttaatgattaagtatttctggaaatgaccaacagtaaccatatctaaataacatgtaacatagggacgattagcactttctattgatgtttttgttaactttaaagattttgaagcaattacgattgatacgatagaaataattaacgtagcaataatgcttaagatttgtatccaatcagatattgtcattatcagttccacctttttatttttattataccaaagttttgaaatagttattgaaagatggtgacagaatgtatatgcaagaaaggcgaacattaagacaaaacaaaatgattcatgctttgattagtgacatagtaaagcacacctataacgattttgaagctacaaagccgaggagtttcagcaatgattgtcaagttgtcaaagaaactttaaaagtggcgtatgcagttgaagcgaatttaccgggtgatttcagtacagcgaaattatcgaaaatacaagcccgtgacttcataagttccattatagagttttgttttcaatttgatataccgttatcatcgccaggactgcaaatgacggatgatatcaatagatacctgttcttatgtatcaaatacagaaaatgcgctgtaacaggtcatagaggcgaaatacatcatgtagatgccattggccaaggtagagatagaagaaattatgatcacagtaaatcaagactgatttgtttatctcgagaaatgcacacagaagctcaccaaatcggttggctaacgtttataagtaaataccacgttgatggaataattttaagtccggatgctgtaaaagaattaaatatataaaaaaagccagagcgaccgctccggcgtggaatgtgattcctagacaaaatcattataccacaatggaggggttgcgtgtgatggcgctgttcgaactaccgcaaattaacaatgttagaacaaaaagaaacgtaataagagctttagaaaaatataaaattatgagagttagactcggcgagagaagaatgccaaagttaacttctacattgaccatagtgccaccatcatttaataatgaattccattctacgacagaagaaagtgcaatatggaatgtagatgcagtaaatgaagcaaaagcatatgttaaattgattgatcatcacatcaaccaacttcctgaacggagtaggcaagtgatactaactaaattcattgaagaaaatagtgattatgaagctatgttggccatacatgtaagtcactcgcagtacaaagaagaaaagagaaaagcaattgaacgcctagcctatcagcttaatatagtagttgaaaaatgaggagggaacacaatgaataatttagcagtattagataaaaataatacattaaacagtcgtgaagttgctgaaatggtagaaaaaaggcactctgatttactacgtgatatcgaaacttatattagatatatcaatcaaaacgcaaaactgcgttctgatgattttttcagtgaatctacttatcaagctggcaccgggaaagattataagtgctatgaaatcacaaaaatgggctgtgaaatgatagccaataaattaactggggcaaaaggcattcagtttacagctttatttgtacaaaagttcaacaagttagaagaaaaagaaatgcaaactttttatattccaggaacctacgcagaagcacttacacttgcagcaaaacaagctgaactaaatgagcagttaatgttagaaaatgaagtgaaaacacaaactatagccgaatatgaaccaaaagtgagttattatgatcagattttaaaatctcctggattaataactgttacgcaaattgcagctgactatgacttgaccgcacataagctcaataaaatattatacgaagagcaggtgcagcataaagttggtgggcagtggatattatacaaaaaacatatgaatttaggtttgactaaatcagaaacggtcagcatagttcatagtaatggacgtctaggaacaaaagtaaacaccaagtggacacaaaaagggagattatttatacatgaaattcttgaaaaagttggaattcaggctgttatcgacaaggatatttaaaaaatcggctttttaccggataaaattaaactttttgctgactttttaccggatttttaccggacaaaaaacaaggaattctgtggtaagatgttattgtcaagaaaataagaaataggagctggtaattatgaaacatgaaatgactaaatatagcatggacggaaaacgatatgtatcatcgtggctacaggtaaatatttttggcaaggcattatgctttaatcataaatcaatcgcaatttaaaaatatataatttgccgagaaagaggcattgtatcttatcgttggtctgatatgagacgcatcatatccaacactcgtggcggaataggtagacgcattggaggtaagaactaatatggtcaaggagcgtaagccttagcttaagaaacctatagcaaaaattacttagttcatgcaaggtgcaaatccttgccgagtgcttttaacgtcaatacctccatacccccagggcagatacgttctgatatggagtttttttaattattaggattgaatggctgtaattgatttatgagattttgttaagtagttactccttgaaatctttataccatatttccctctaaagattgaaacgttactttttgtttgttatattaaaaataaaaagggtgtttatgaatggaagtaggaagtttggcagaatgggtatcaggaattgggacattactagcggttggaacgtcattgtatttggctaacaggaaccccaagaaaaaattattagtttcacatgaaattaaagagataggaactttagcaacggtttctgattataacatagaaacattagttgtaactgtcgcaaacttggaaattacttcagtacaaataagagatttattttttgtttcagaatcaatacgaataaaattaccactaagtgcgctggttggttttgctgcaatgggtaaaactactccatgcgttgttgatccattttcagaagttaggttcttggtgatttataatgattttcaaagtctgttaaaagaaaaaaatgcaagaggaatcattacgggggaaatattggttgtagatgaatcaaataaaaagcatagagataaagtcaaattaactattgaagttgttgatatgtaaatatcattagtggaaaaagagctagaagagccaataaggctctttttttattggaggaaataaaatgattatcaaagaaatagaagtaagcaaaattaacccagcaccatacaatccgagaatggatttacagccaaacgatccagaatatcaaaaattaaaaaaatcaattgaagagtttggctatatcgatccgttaatctggaacaagaaaactggtaatttggttggtggccatcagcgttttaaaattttacttgaggaaaatccggaaaggttgactgtatcagtagttgaccttgatataaatcaagagaaagcattgaatattgctttaaataaaatagaaggcggatggagtactgataaattaggcgaattactaaaaagcattaatgatgaagaaatgctaaatttaacaggattctcagcacttgaaatagatgaattaattaaagaattcgaattacctccagctactgtggataaagtaaaagaaaacccgttagactcgaatctgttcgagtcttttttgtttcctcctttttcgtatttagattcaaaaacaaagaggtggagggataggaaggaccaatggaaaaatttagggattagaagcgaattaggtcgagaaggtaatctcacgtttgcatctagcttgcggtcagcaagtttgacaggaacgagtattttcgaccccgtactttgcgagttggcttacagatggtttactcctggagaatctgccaaaatatacgatccattcgctggcggctctgttcggggtattgtggcaaaagtgcttggccacgaatatactggaattgatttaagaaaagaacaagtagaagctaaccgcattaatgctaaagaaatcggattagatggcattaattggattaccgataatagcttaaacgcggataaacatattgaagataactcgatggacttattatttacatgcccaccttactttgatttagaagtatattcagataataaagaagacattagcaacatggaatacgaggaatttattaaagtgtactccgagatattggcgaagggtgcgaataaattaaaagataatcgatttgccattgtggttatttcagatgtacgagataaagcaggtttttatagagatttgacaggtcttactaaatcggtatttgagaagaatggtatttacttctataatgacttgattttgttaaactcactaggctcaggagcattaagagctcgcagaaatatgcgtaacaggaagttagtccgtattcaccagaatgttttagtgttttataaaggaaatcctgatgagatacaagaacatttccccattttagaggtactggaagataatttagaagaagcgcttgaatctatcgacatttaaacgtatatcccttacagtaacagcataaaggaaacggagtggtgtacatgagagaagatattcaacgattaaaagataaagcggacacagctaaaatgaaatatcatcgaaatataattgatagagaaacagctaagaaacaaataattccatacgcggaagcttttaatactagatcgaaagagattgctaaaaagtataatcaaaagcctaaattactttcagtagcagcgtttttaagataaaaaagaagaggtgcgttaacaccccttcccatagagccatcactggccatgagatagcaaacagacctcgcgaggttttagacattgctatctctttttctattctaatagaaagctggtgaaaaggcaatgaaaaaggagaacgagcgttcggttgatgggaacttaaatgatgatttattagatttagagataactaaagctcttgaagaagctaaaacagatgaagaatacaaaaaaattattcgagctacgctggggaagtggcttaataatctacaagaaggcaatatacgtcttgaatctgtaaatgaccttaaaaccctcattgaagcagatagattactaagaagagattaacttttattgaaagattggagaataaacatgacccttatattttggactaaaaatggacaagagatggaatttgatctagttgaaaatgtagagattgacgagaaaattattacattcgattactatggagaaggtgaaaaaagaggcgtagtgtttatattaaataatcttgctggcatggctgtagaggatgagaattcggagagtgaaagtaaagatggtgcatcttggtttaaagtgtacaggggttaagtaaagtaaaaacgaacataaacataagtaatggtggtgacgttgatgtgtcatggataacctagataaagagctcataaaaaaagactatttggcaggaatgaagaacaaagaaatagtagaaaaatatggcatatctccgaataccttgaaggcgtggattagaagatatggttggaaagatgaaaaagaaaagggtgcatccaaaacaaaaaaaatgggcgcaccctttggaaatgtaaacgcaaaagggaattcgggcggtggggcacctttaggcaataaaaacgcgataggtaactctggcgggggtgcaccctttggtaataagaatgcactttttacaggagagttcgaaattattgatcctgattactttagcgatgaagaaaaaaaaatatacaattctctgacagaccaccccctagcccacgctaataatatcattaaagatgaatatattcggaaaagaagaatgatgaaacgactaaacgaattagaaaataatttgtcggagtctgaaaaagagataaaaaaagcttacttaaaacaagatataagaaaagttattgaaagagacggacagaaagcaattatgacagttcctgagctagtacttgttgaacaaaaagaagaaactaaacgtaagatagatgatgttttacggctagaagaatctattacaagacaaaacggtgttttacttagagcattgagagacaagtctgcaataattgctcagctatctatgctaccgctcaatcaagaaaaaacacaaaaagaaatcgaaatgctagaactcgaaatacaagagcttaaaggtatagacttagaaaaaccgcttgaaattagagtctcaagggcggtgaagaaacttggtagaagctaatgtagttgatttagtcgttaaccctcattttgaggagtacgtatttgattggacacaaaaaacatttcttgctgtaggtgcttatggttcgagtaaaagctatgcaacagctgaaaaaattataataaaattatttgaagaaaaacgaaaatgcttagttgttagggatgttcacgaatcgcacaaggattctactttcgctttattaactgaaatccttgaggaaatgggtgttgttgggagaggtaaaaggaaagttgtaattactcaaagtcctatgaaaataaaatttcctaatgggtcatccataatttttaaaggattggataaacctagtaagttaaagtctatagctaatatttctattatttgggtagaagagtgctcagagattagttatgctgcatacaaagaacttttaggacggttaagacatccgtttttaaaaacacatattattttaacttcaaaccctgtcagtatagataattgggtctatttacatttctttgaggacttcataaacaaacgttttatattgagtgattcgttattatatgaaaagcgaattattaaaaagaataatacgtattatcatcatagcgttgctgaagataattattttttaactcaagattatattgatgacttagaagatatgaagaattatgatcctgatttatatcgagttgctcggcaaggcagatttggtgtgcttggtactaaagttcttccgcagttagaagagaaggaccacgactggatgatagaagccatcaataacattaagaatccaattaatcgaaatggaatggattttggttttgttgagtccatgaatgcattactcagtatgacaatagaccctgacaagaaagatttatatattcactttgaatattatgcaaatgggaatacggatgatgtgacggctcaagatataaaggaatttaaagagacaaaagaagtaatttttgctgattccgcagagccgaaaacaattaaatactttagtgataatggatttgttatgtatgcagctcacaaatttccagggtcacgtttacaaaacacaaaaaaggttaaacggttcagacatatttatgtatcaagtaactgtagcaacactataaacgaattaaagcatttaacttttgctaaagataaattaggaaaaactattgaggatgaatttaatattgatccacatacatttagtgcgatttggtatgggctggacggttatgaagtagctgatattaaagacaaaacagaccgtagtaggcgagcaagaagggagcgaagaaaacgtggcaaataaaagtagagcgcgagtagtaaaagcagaaaaaaataatacactatcaaaccaaatttccaaagaagatgcatttaatggtatatacggtgatgacagccaagtaattagaccaccatataatttagaagaactatctaaaataacagagaattcgactgtattacaacaatgtattgatgcttatactactaatctctttggctttggcatagatgcagagtccagattagatttaaatagcaaagatatgacaccggaaaagaaagctaaagcagaaagtgaaacaaaaagacttcaagagttcatacgttatgcaaatctcgatgaaggaacagaaactgtgtttcaaaatattatcgaggatcaagagaaaacaggaaatggttatattgaagtgttacgagatggcaaaggtcaacctgtagagttagtacattgtgatagtcaatatattcgagtatgtaaaaaaacagagccagtagaagtgggatacacaatcatggaaaaaggggagccggttaatattttgcggaataagcgattccgtaaatttgtgcaaattattgatgaaaaaaaagtttggtttaaagagtacggtgatccacgaataatggatagtaccaatgggaactatgtggaagaatcagaattagaatcaaaagaatttcgtgatgctacggaaattattcatttcaaaatcgggacctctgcctatggggttcctcgatggattggtaacgtagttagtctttatggcgcaagaaaggcagaggaattaaatctcttgtactttgttaatgggcgtcacgttccagctgctgttgttgttcagggtggcttgctagatgaagatgcatataacaacttagaagagtacatgaaaggtgtctcagggactgaaaatgcctatcaattcttagttttagaagttcaaggggaagagataacaaatgctaatggtgataaaaacttatctgatgtaaaagtagaaataaaatcattggcagatatgattcaaaaggacgcaatgtttttagaatatgatgcaacacacaggaaaaaaatgcgttcttctttccgattgccgccaatttatacaggtgaagcggacgaatataataaggccactgcagaaacagcacggaagacgacggaagaacaagtattccaaccgatgcgtagaaagttggccaggaagataaatggtgcttttttagaggcgttagatatatctgaagccaaattagtattaaaaagtcctgatcttacagatattgcttcaatatccaatgctatatatccatttatctcagcagcatccgtcattcctaatgatttgcgtccaatgcttgaaaaattattgaataggaagctagatgaattacctgaggaatacaacaaaccaatatctattcttctcgcagaaatgcaaggacaatctaatgaacatactgtttcggaaccgaagacagttcaaaaatcactatctgaatacgataacgtattagtaatgaaacagatgagagatttgttacaggagttgaaggacaatggtaaactatgacgctatagataaccttatcgatactatcaatatattagtagagaaggttaatgaaggagaattcgaaaaagaactacttggacaactaggaatgaaaaatattcccgcatttgttgagacgttcgagaaggacatttctagccttcttctaatccagaggtcttattatattaatcaacttaaaaaaactgtaataaaggcagaaaaaccacttacgattgaagaattatttcaatactactctaatgatttgtttataggtgatgattttagaataaatatgtctaaaaaagcatctgattttcttacagcaacaacaaaagacattagtaaaactgttatgaagtcactagataaagatgtctctttcaaacgtttatctggacgttctgtgagctggattaaagaatggtcagaggatttggccaacctaatgaaaattagtactcaatccgaagtagagggggtgctaataaaggcactgagtgaagggaaaggtattcaacatgtagagctagcgctaaaggatttacccgcatttgaccgaaaaagggcaaggacaacggctattacagaagttttgacagcagctagtgttgctcagcaagaagcttttgaacaatcaccatcagttgaaggcaagaaatggaagcattccggcggtaaaggaatcgaaccccgctcatcccatattgaattaagtggaaaagtggtccagataaatgaaacgtttacgatacctggaagcggcgagttagcaaaatatccgagagatacagacttgtctgcttctgaaaggatacattgtcattgtgcccttggaccagctgtaaatgaagagattctcggatggacaaaagaagataaagaaaaagcaagaaaagaagttatggacgatttagacaagaatccgtacactaaaaaacaaaaagatgcaaaaaaattggcgaataaagttggccaaaaaataaagaacgaacaggatattttagatgctggggaagtagtgtataaaaacattgaatctaaagttaatttttatacaaggagaatagagcgtcttaaaaagattaatgataaggctaatagagatttgatttttgataagataactgcaaaagagcaaattagaacgaggttcttaacaagcaatctacaagaaaaagcagcagaaaaaagattagaacttattttttcggaactgaaaaagatacgaaaattcggcaatgttaagatgcttaatatattagataactcagatttataccttaaacagattttgataaataataagaaatactttccagcatcgtggattactgagtcgaacaagaacagtgttttacttttaaatttaacaaaagagcgtggatcacaacaactatacaaaggagtcagcatagttagcgctggtgtccatggtacaaaatcaacaataatccatgaaatgatgcatcactttgaaatttcagtaccgggatttcttgctgctgaaaaacttttttatgagcgtagaacgaaaggatacgatttggtacaattaggttatccatacgatgatcaagaaatagctagattggataaattcgttattgggtacattggaaaagattatgcaggaaccggttatgaaataatgagtgtaggattacaagagatgatggaagcagacactcgtatttttagtgatacagattatattcactttatcataggaatgttagcgaggttatagaatgaagaactacttttatattaaaggaaaatttgcaggtgagattgtaatagtagaatttaaagatggtcagcttgaatccgacactaacgagatggttaatttgattaaatcggcgtacaaacatggtaattatatcccgccaaatctttatataccagagaatggtctagaaaacgctgcttttgcttatcagtttttattagatcggatatttggtgaaattatagagacttcatacgatgctcctcttattccaaagttagaaaaaggagaaaaataaatgtaaaagacttagattattaattctaagtcttttttattgggttaaaaagttcccataaaaaaactttaattatttgaaggaggtgaaaaatatggggagagaattagttaatgcaaagataaattatgtttcatatgttgataaagcggcaaataaaaaacagtttttcttaacaaaatcaaatgaacaacctaatatacagaagcaggttgagctatttgttaataaagaggactctaaacaattagtttatggtttagtttatgagccggatgttgaagatgctcacggtgatttcatgaaagcagaggaaatcgaaaaagcagcacatcaatttatgaaagatgcacgtaacatcgataagcaacacgatttcaatgcgggagttggtgaagtggttgaaagttatattgctcctactgattttagtattagtgaccaagttattacaaaaggtagttgggttatggctacaaaggcttctgatgcgatttgggaatctattaaaaaaggcgaaataaccggttatagcatggctggaattgcagaagttgtagagcaatcagaagagcgtgcggatatcaccaaagatgaaaaaggcttttttaaattaatgaaggagtttttcactaaagggaatgttcgagatggttacgagaaaggtaaatcaacacaaaacgtccgcgcggctttgaacgtgtttgaaaacgagatttggaatgcacaaagccataatagtgttgatttccaaaaaattaatgatgctattgcagattttcaatcaatcattaatgaaattgagggtagtggaactgaagctgctttaaaagcattcaaaaaagaaggagaagtggaagatatgaacaaagaagaattagagaaaatcattgagtcagcgttaaaaccggttattgagcgcttggactcgattgacaaagtaaaggacgaagataaggtactaactgaagaagaaaagaaaaatttaaaagaagaagatgcaaagaagaaagaaaaagaagttaaaaaagaagatttagcagaaatcatcaaagaaacaatcggaaaaagtattgagccaattaacgaccgtttgcaaaaagtggaaaatgcacgggggacttctaatcaggttgaaggagaacaaattcaaaaagaaaataaatccgtttgggacggactactttaaaggagatgaacgaaaatgaacaatgaaactattatcgaaaaagcatcaatgacattaagcgatttatcagctggcggtcgaatgaatccggcacaagcgagcaaatttattcgtatggttcaagatacacctacaattttaaaagatgcacgtttagttcagatggagtcagatagacaaattattgaaaaaattggcttcggtcaacgtataatgcgtgctgcaagtgaaggtgttgggttaacagaggcagatcgtacaaagccatcaactagtaaagtaacgcttaatgctaaagaagtaatcgctgagataaacttaacatatgatactttagaaaataacattgaaaaacgtaatttaaaagacacgattatgcaaatgttagcagaacgtgcagcggtagatattgaggaacttatggttaatggtgatacaagtaatactacggatagctatcttgctcaattggatggtattcgtaaattggcaacatctcacttggttaataatagttcgggagaaatttccagaacggcatttaaaaatgcgaagaaaattattccggctaaatatttacgttcaccgcaagactttcgatactatacttctccaagcgtagaaacagaatggattgataaattaggcgaccgtcaaacttctcttggggatagtgctgtagaaggtaaaactgctcgtccttttggcattccaattcaatcttgcgcaaatctacaaccatatggcgatggtgcaggtaatgatgtttcagacattattctaactcacccaaaaaatattattttaggaatgtcacggaatattagtattgaggtagataaagatatccgttctcgtcaattcattattgttttaacggctaaattagatacagtgttcgaagaagaagatgcagtttctaaaattactaaggttttggagtgatttaaatgagcaaatataaagctatgcttacaaaaggtgaacattatgttttgttaccacaaaatattctttttaaaaaagatattcctgttgacatcaacgaagaaattgttaatattttacaagatgcagaggagttcttagttacagaagagacgtctgaaaaaacagaagagacttcggaagtgaaaaaagcgaaaaaaagcagcaaagactaggagtggtttgaatgtcctatatcacgcctgaagaattaataacatactcagactttgaagcagtaagagaaagaaagcccgaaaaattaaaaatggatattttagaagctgaaatggatcttcaagctgcgttgggtaaatcattagttgatataaaaagcagaagtgtagaagaaaccggctttccagaaacgctcaagctagctttattacgactagctcaatttagagctctgtataatactagcgaatctatgcagaaaggctattcagctgaaaaaattgctgactattcttattcattagcaaacggcgaatcaataaattatccagatgtatcaaatttaattgctgattatttagatcaaaagtcgacagataaacggaaattccgatttagaatgggggctttttaatttgagttattcacaaatgctggataaaaaatgcgatatttttcatttagcgggcaaagaaaagcaagaagagggtaactttgggattaatatttccaacttgccagatgaagtagaatatagtgacactccagatttaaaagcaattgattgttactacatgaagaagtcagaatcaattgtgcagggtgaaccacaaaatattttaatacagagttggcttttacattttaataaaaatattgatgtccgtcggttagataaagtaatagctgacggatatgtttttattttgcaagagccgataagtcctaaaaaccatcacattgaagtggaagcattccgaaaggtgatactgtaatgggattggaaatcgaaggtttagaagaatttattgcagaattagatacattcaaaaaagacttgcctaaaaagtttaaagaatggctagaagcttctggaatggcctttcttgatattgtgcaagatgagattatttcatctgagacagttgatactagaagactactaaattcgttttctaaggcagctgctggcaatgtatttattatgtctagttcggggatgtctttagaagttggaacaaatgttgattatgcttggtatgttaatgatggacattttacaattaatcctaattcaggtaaggatagacgctgggttccgggatactggaaaggtgataaattcacgtatgatccaggagcaacaaccggtatgctgttaacaatcaaatggatagatgggacaaattattgggatgtggcaatttcaatatttgaaaagctctttcaaaaaggaatggataaacagctacaggactttatggaccaatgttttaagtgaggtgagattttggaaacaaaaaatgttgagttgggttcaataatggctttttgtgtgaaatcattgaaagatatcgcatcgaatatcaaaatttacgaaaaaagtgttccaacaaattttgtaagtcctagtttgtactttccacaaccttcagttagtggcgttggggcttctttatcttcattcaaaaacatttgtatatggaatattaaggtttttgattcagataaagtaaaagcattcaaaattgcagaagtcgttaggaacgctttttattctaagaggctaataattccagttctaaagccggacggggaagagtcgggtttttttattcgactaaaaagcgtggatattcgggatggtgatgagttttcaaagagtattatactgaactgggattcatatgaacgttatcacactgaggcgaagatggtaattagtgatgagaacgcactacaaataaatggaggtctaaagaatggctaacgtaaaaaatgtgacaaagaaggcggttgaggtttctgatgtaacacaaaatcaacaggccgaagaaacacaattttctgttgaacagttgaaagagcattctcgtgctatttttggcgtacagccagaagttatcgatggtgctttttttgctcacacgggaaatcaaattacaaaaacggaagcaagaaatttaattgataatttcttgcggaaagtggtgaaatgatatggtcagtggaggaacgtttaatgccggtgtagaaaaaattcgtccaggtatttatacaaattttaaagcagcggcggccgaaagaactaaagcgggcgaaaggggaaccgtagcgttacctttagctgcatcatggggagcagctaaagagtttgtagaaatcaataaagaagaggacgtagagaaaaaattaggcctttctctagcgcatcaaagtttcttgttattacgagaaactttgaaattagcaaaaacagtgctagtataccgtttaaatgatggtattaaagcaactgcaacattggcaactgatgtggtagttacagccaaatatggtgggattgttggtaatagtattacgattaaagtagatgaaaatgtggttgatagttctaaaaaagacgttactacctacttgaatgaagttgctgtagataaacaagtagtcggaacggcatctgaactaatcgattctaactacgtttcctttaaaacgacaagtactagtgagttgcaacaatcatccggaactacgctagttggaggtacagatcaacctgttacaaacttggattacacccaattcctagtgtctgcggaaggtgaatattttgatactatcgcgtttccagtatcatcttcagacgttgctttgaaaacgtcttttgtttcatttgttaagcgtatgagagacgagcaaggcgtgaaaatcaaaggtgtggttgccaacatgcctgctgattacgaagggattatcaatgttcgtaatggggtgacattacgagatggtactattttagagcctcatcaagtagttgcttgggttgctggagctgatgcttctgcctctatgctgaagtctaatacttttgttaaatatgatggggcaattgatgctacacctcgattggccaatgatgaagcagaggaagcattacaaaatggtgaatttgttctgacatttgatgctcgcgacaaagcagtatacgtagaacaggaccttaattcattaactacatttagtaaagaaaaaagctctaaattccgaaagaataagatttcgcgaatcctagatggcattaataatgatacacgcagaaatattttagacgctattaaagaaagaaaagatgctaatacagacattcccgcagatgaaaatggggtgcaatttattctatcgatgcaaacagcatatttaaatgaattgcaggatagtggagcaattacaaattttgactccacagctgatattacagtttcactaaataataatgttgacggattcattgtaaatcaatctatcgagccggttgattcaggcgagaaattctactttactacggaggtgaaataagatgtcatttaaagctcaaaatacaatctcaggaaaagaaggcggattgtttatagatggactagaagttgcagaagtaaaaacatgtgaagccaacattgaaaaaaataaagcagaagtaaatgttatgggacgtcgtatgacaggatcaaaaaccactggggcaaaaggttctggaacactaacactatacaaagttacttctcgttttgtgaaaatgatgcttgactatgttaaaacaggtaaggacccttacttcacggttcaaacatatattgcagatgcgtcatctggccgaggaactgaacgcattacattactagacgtaaatattgatagtgctaaaatcgttggtttggatgtggattccgaagcattagaggaagaaatcccgttcacttttgaagatttcgatgtaccggaatctctacggtcagattttaattaagcctataaaggcaaaagcttgtggcttttgccttttctagtaaaaaatccaaacaaagaatggagaaataacaaatggtagcagatagagaaattgaaaaagtagaagaatcaaatgaagaattagtttatgatatcacagcatttcttcctggaaaacatgaagaaaaggtcaaactagaacgtgctgtctcgaatcgttttaaagataaaaatggaaatgtaattaaatttgtatttgaaaatgtaacttctgaacgtctcgaggaactaagaaaagattgcacaaaaagaattccaaaaggccgtggacgtcaaccagaagaaaaatttgattctgataaatttcaagcactcttggcattagaatcaactgtttatccgaagtttagttctaaagagttgctaaacgcatacaaatccccctctgctctagaagtcgcgaaaaaagttttatccgtacctggcgattacatgaactggatttcggcagcaagcgaagccaacggatttgatgacgaaatcgacgatgaagcagagtctattgaactagcaaaaaactaataaagggcggggatagaaatgcgacgtatgcatattatgcctttactgaattacatcaatccccgtcagatattcaagaaatgttacgtttaccagttcaacagagagctttgttttatgcttttatagaatacaagttagaattagctgaaaaggaaatgaaaaataattagaaaggaggaattgtcttggttaaaatgaccgcggtattcgatatgcaggataaaatccaatctaagatagacaaattaactaataacctaaaaaaaatggataaacaagctaagtctatgcaagatatggagtttaaagttagattaaaggatgatgttacaagaaatgcaactcgaattcaaaagatgattacaaaagattttgcaaaatcttatgctatttcagttggtattaatgatacagcattaagaggcgcaaaaagcatcgcgaattttatgcaaaaaaatatgcctaaaacttattcaattggggtgaatattgctgataatgcaagtaaaaaggttgctggaattggtaaactattggataaaaaattacctaaggcttattatacaaaaatagatgcggatggcaaaccttttgaagtcactgtcggacgattaatgaattatttacgtcgcaaaaacttcaaaaaatatgaaattgttttatcggcaaaagatacagcaactgaaacgataaaaaaggctgcatcttttacaaagaaactgttctcaaaaggttattcagttactatcactgctattgataaattaaccagtactgctgcacgaatgggttcaaaaattaaaagtgtattacctaaaatgattaatattccagttaaagctttgaattatacagctagcgccattggtgcggcaaaaagagctttgttttctctgccgactttgttcacggtaactataggtgctgtattagggaaaagtttttatgaagctacagtgaaatcatcagctacatttgaagaatatacagtgtcaatgacacactggctaaagtctgcagataaagcaaaagattatatgaaatggatcggacaatattctgattcaactccttttagctcggctgatttaatgccagccgcggcaagagcaacaggtttaacaaagaatagaaaagaatttgaaaagttaatgaaactatctgtcgatatggctgctttaactccgggaaaaacagtcgcggagtcaatggaagcattagctgatgcgcagatgggggaatttgaacgattaaaagaatttaatatgaaatataccaaagaatcaatggatgcagctggtggatttgacggttttattaaggatgcgcaagacaagttttctggtggagctaaagggttttcgcaagcctatacaggaatgatttcaactattaaaggttatacaagctcattctttagaagtataggtgatggattccaaacagcgattaagcctcgattatctaaagttattaagtggttagaagaaaaccaagatgcatgggcagcgtggaaagaaacggcagttgaagccggttctgagattgctagctggttgggtgaaaaattcgatggtttatttagttatattggtaagaaattggaatctatcaatgagtggcggagttacggaacatcagttactaacatattcaaacaaatcacgtatgaaattggacaagatataaataattggttatacaaaaatggtggaatgaatcaaattaaagacttttttagtaaggcgggttctgcttttggttcagcaataaatgcttttattactggtgttttgtttagcagtgaagtgaagggcgaagaagtagcaggaagcatgggattagttaatattatggctaatgtaggtggcgaagctgctaagtcatttgggaaatcatttctagattcactagatccaggagcgctaataaaacaaattttttctaaattacttgatatcaatacaagtggtcttaaatctgtttttggcaaaatgattggcaataaagagcttgaggatcaagggaacatatggggaactttattagctgacggattgttattaggatttgctttgcgcttcaagggaattcggctgattatggctgctggtttaaaaccgattagtaaaatagcgggcaagggcattaaaggcctaggaaaaaaaggaatgggtaaaatatttcctgctactatgaaagtagaccctacgaaaaccacaagagtaggacgatattcagaaggcgggttacctggttctatatctaaattaggtaagtttatggataaaactggagcacttggcaagggattaaaaggcttaggttcagtagccaaaagaattcctgtgcttggcacagcattatcggctacctctctcattggcataaataaagaaaatgctggcgaaaaggtcggagattttggaggcggtttgggaggtatggctgcaggagctgctggaggagctgctatcggttcaattattccagggattggcacagcaattggtggtgttattggatcaattatcggaggtatcgccggaagtgagctaggacagcgaattgggaaatgggttcaaaatggacctgttggaaaagcttttggaaaagtaaaagattttcttgcagagacgttgtttgacggtggttggtggtctgaaaaatggaatgatgtaactagctatgcaagtgatatgtggatacagtttaaagaaggatggaccaatattactgagtgggtaagtgagaaaattgagcttattgggggatttttctcaagtgtatggaaaagtatctcaaatacattcgggggatttgtcgaatggtttgataaaactatttggacacctatttacaacagtgcagttgataaaattaatctaattgtaggtatattcacagttgcatgggaagtaatttctggtgtttgggcagttgtgtcagaatggttcaatacaaacatttgggaaccgattaaatcagcagttgaaatcgtaggctctgcaatatcaagctacttttcaacctcatgggaaatgataaaattagtttggttcctcgctgtagaatggtttaatacgaacatttgggaaccgattaaattagcagtttcaactgtggcttatgcaatatcaagctacttttcaacctcatgggaaatgataaaattagtttggttccttgctgtagaatggtttaatacgaacatttgggaaccgattaaattagcagtttcaactgtggcttatgcaatatcaagctacttttcaacctcatgggaaatgataaaattagtttggttccttgctgtagaatggtttaatacgaacatttgggaaccattaaaggttggggcacaagctattggtgaagctataagtagtttcttccaaactgctcacgatgcagtaattagtgcttggaatggagttacagaatggtttggtgcaaatgtaagagatcctatagttggggtcgctgaagatattagcgcagcttttcaagatgcgtttggctggataaatgatgtaataggtaaagcgggagaagctgctaatagcgcgaaagattggattggaggaaaagtaaacggagcaaaagatttctttactggaattggtgaagaaaagactggtttaaagaagaaatcagtgggaaaaaatgccaccggaggtttaattactcaagaacaactatcttggattggtgaaggtggtaagaaagaatttattattcctgttgatcaaaatgtagggcgtggaaaaatgcttcttggagcagctgctaatgctctcggggtcgatatgggaggacaacaaagaaatacagttaataacgttatacaaatgccttctgtaccgctacctgctagttcagcttctatagcaatgctttctacaggtgctaatggtcctgcaacaacaaattcgataactgtaactccagagattgcgcaagcggctaatggtcctgcgagtgtatctactaaaagtggtgataaaatagtgactgtaaactttaacggagacaatcactttgctaataattctgatatggaagattttgaaggaagagttgttagtgtaattcgtcaaacattagatgatgaagattttgaaagtggagatggtattcaagatggctaaaaaaagtgtctatcagttctggataaatcaagggaaaaccaagacaaggctccccgttcttcctgaaaaattagaggtttcaattaatgggaaaaacgataatttcgatatcgctagcttaggcgaagtgacaataattcaaaaaccaggtgctaaaacatttgctttctcggcattttttcccaaaaattttggtccgtattgcgaatttaaaccagcactaaatgcaaagcaatatatagatagaattgaaaattggatgagcaatatgactccgattcaattcattgtcacgggggctggaattaacttcacttgttctatagaatcatttaattattacgaaaaggctggagaagtaggcgactggtatttcgatattactttaaaaatatataaaaaagtaactatcaaaaaaatacaaataaaaaagaaacaagttgcaaaatctagaccagttgcaaaatctagaccagttgctaaaaagaaagttaaaacttatatagtaagacaaggtgatacgttgtgggatttaagtaaaaaattttacgggagaaacgcggattggcgcaagatttggaataaaaataaggcattgttagtaaaaagagataaacgtaatttaaggcagccaggtcactggatatatccggggcaaaaattaattattccgtgaggtggttaaaatgatagaaatttttttaataacgtcgactcattggattctattaccagtagaggaggttactctaagtggaaaaagatatcaagctcctcgaaaactagactttaaattgttttatccttatggaacagatcatcaaaagcaaaatgtcgaggaaggaaacacaattttatttagatggaaagggaaagagctttttagaggtattgtttttacaagaaacattactaaaaatgctattgttaccgtaacagcatatgataaaatgcaatatcttttgttgaataaagatgtttacgtttttaataacaaaagactagatcagatagtggcaaggctactatctgatttttcattgccaaaaggaacaattacaaacactggttatatgataaaatcgcttgtcttttcgaacgttacttctctttacgacattattttgaaagctattagtgaaacttataaacagagtggtagaacatatcgtatttatgcaaacaccggtaagctgtatcttgaaaagtggaatgaaccttcaacaatgtttttattagaagatacaaatacagtgacagactttaatgtgaatttttctattgatgatatagctactcgggtaaaagttattttgacgaaggataaaaaaacgctctatggctatgctagtgatagctctgggagaagtaaatatgggttgattcagcatgcagagtcatcgagtgataatttgaatcaagcacaattgaataaaagagcttctcaaatacttagccaaaaaaaaggacgaaaaaaagaagtgacaattgatgcgttgggtgaccctgcgattgtaagtggcatagcgattatggtcaatttaaaaagaataagtattaatcaaaaattttatgtggatagcgattcgcacacattcaaagggaatttgcatactatgtcgctcacgttaattgaagagaataaaattccggaggttcaatgatgaaaaaacaaattcaatcaatcgtaaaaggagttcttaattcagaagttttagcggattttgttccaggtgaaattttaaacattgctcctctttcggtgaaaataaatgacaatgataaactgattctttctggtgaacaagttcagattactgaaggatttatggaacgtggaccagttgaaggtgatagagtactctgcgctagattaaaaggcggtcaactattcgttgttttggatagattaatttgaatgaggtgataaatttgagcacacctgaaattgaaattgataatgatgatttagaagcatttgagacaatttctaagacatatgaaatcgacttcgttaataaaaaaatgaccgggagaataatcgatggtttagaagctattcggcaatttgtacacttagctatacaagtatctagatttaaatatccggcctatagtgacgattacggtagtgagttatttgacttgataacagatgaagaatctacagaagaattgattgagattgaaataccacgattaataagtgaagcaattgaatatgacgatagaatagaagttgtagataattttgttattgaaaaagttagtggctcttttcatatttcatttgatgtaacaacaagtgaaggtgttttagaggtgcaggaggtgatttaattggtcaattttgaggaaatgacattcgaaaatataatggagtcaatgttagatgcagttccagcaacattagataagcgtgaaggaagcatgatttggaattctttagcaccggcagcatctcaaatcgcattactatacacgtggttagagaatgcttttgaattagtattttatgataccgctccagatgaattcttagatagagctgctgcaccatatggtgttatacggaagcctgcggtcgctacacaaaggattattaaaggtatagacgaaaatgataataaaatagaaatacctgaagggtcgcgtttttttgtagaatcggaaaatatatacttcaaagtgacttcttcgacgattctagaacaagtagtagaatgtgaagtggctgggacaaaaggaaatgctgatttttccaatgatacaatattgtctttagataatatttatgggctagcgaaagtagaaataggcgatattttaattccagggtctgatgaagaagagttggaaacttttcgaaagagatttttcacgaaaattcaaaaggatgctttctcgggaaacaagaaccactataagttatgggcagaagaagttttaggagttggaaaagcaaaaatttatcctttgggatacggggagggtacagtaaaaatcgttataactgatactaatttacacccagctagcccaaccttggttgaacaagtaagaaattatattgaccccttaccacaaaaaggtgagggggtagcgcctattggggctaaagtttttattgaaagcgccgcatggaaaacgattaatatatctgggcaactagttctgaaagacggtaagtctgtcaacgatgttatagaagaaataacaatggatattaacaagctatttaagagcataacctttccggaagatgaattgacatctgttaaactcgcagttattagcaatatcatattctctgctccgtcggtgctagataactttaatataaagcttaataacgaagcagctaatattattcttgctgaaaatgaagtgccacaattaggcgctttttcttttgaactaatttgaggtgattagaatgtatgaagcgttaaaaaacaaattgccagagattatttctggaataagagagattgacggtttacttaaagctgaatcagaacagcttcaaatctcggaggataacatattggacttgattgatcaggctcactttcaatcagctacatgggcaataggaagattagaagacatctttaatgttagcggttcggtagatgatagtttagaagttcggcgcaaacgaatagcggataaacaagcgacgaatattgtcgctagcaggaatgttttagagaatctggttaatcaatatttaaaaaaagatagtgcaaaaatagaattattgcatgagttatatcactttgttgttagctataacttggatgatttgcagttcttttccgaaataacttcgatgattgagaaaacgaaacctgcgcatcttggatattcaatgcgaagcgtagtaattgaaaacgtaacatttgatgagaaagtaatcgcaaacaatcgacgatatagacgagtaagagagattaaatttggttacccgcttttatttgaaaataatgaggtgatactatgattaattctaattatagggaaagagctgcagaagatttaagaatgcgaataaaaaaagtaacaatcaatggcgaagaacttccattcacttctactaggaatggaaacaaagtaacagttataactgaacgaagccctaagattacacaaatacaatcattaaagatactagacgaaaacaatgttttaattttagaaaaaagttcacaaaccgatgtgagagagaatgttacattagattttaaaattgaaattgaggtgaaatagaatggccattgattcatatattccaacaacatggaatgacgaaagatttgtatatcctgaggattttaccaaatgggagcaacaatttaaaaaaatcgtagatgaaataaatcgtcatacaggtacaaaaaacgatcataatataacaaaagcagatgtcgggctcagtaatgtaaacaattttggcatagcctcgttagaagaagctcaaatgggttctaattcccaaaaatacatgactcctttacttacatcagaagcaatatcgcaattacaatcacttaaatcgataaatggtcgaacaggtgatgttttgctgtccaaaggagatgtgcagttatctaatgttgagaactatgggattgcatctacaaatgaagccaaagcaggtatcgcgacagacaaattaatgactccagctaatgtacttgaatctattaaagagcagtttaatacacaaaatattctttttgaaggggcagcgtggccagcgcctagcacttataaatttgctggcggccaaaaagtttcggatcaaaagctaggactgatatttatttggagtgattatgatgttgttccagggcaagcaaacgtagcaaataattataactttgactttacattcattcctaaatttttcatcaataaacattctggtgcaaacgtaaatgtccctgttgctacaaatttcaatgctcaagtcgctcaaatcacaattaaaacattatatctcactgatacaactttcgcggggcacgatttaaactcaagtggcttaaatgcaaatgatgctattcttagatatattttaggagtgtgaaaaatatggaaatttacattaccacaaacgaggaaggatttcttacaggttattcgacaagcgagtgcgtgcctggcaaaaaaatcgagatagacgaaaacgatgtgttttttcaacgtggttttgctagttataaatataaagtgaatcaacttatttttgacgaaaataaagaaaaagagtttcagtatgaaaagactctacaagaggcaatgttaagtactgaagaacaattactaactacgcaggaagcattagttgaattgtatgagcaaaatacaaaattaggacagcagttgattgacacacaattggcgatggtagacatgtacgaagccaatctataggtaaatttttattgaaggaggtgagaaaaatggcagtaatctatttgaatttgattttgaatggtaaaaaaacattcaaagaagtaccacgcttgctacaagcacaagtaaaagcattgttaattgacgcggattgcgctgaattagcagagtaataatgttggaacgaaggggtcgatggggtaatgaaaacaaaatggcgaaagtttatagatcaaatgcttgaaactaattacaaagaagtttttgcgctatttttcttgttatcagtttcattttataatattctgactggtttttttttgatgacgtctggtgataaaattgttgaaaaaagcaggacgtatcaactgatggacaatcttatgacaattgatacatgggggttgttgtttattttaagtgctgcactgatactaattgcatcttttcaagaatcaaatgcaagatttataaatttgatgattggcgggggaataggtgcgatagtgctgttcttatattcagcagcgagctcagagagcgctgctacaaatttattgccgagtcgatatgctttgagcgcatgctttaatctatttgttgcaaccatgggaggcttagagctatggaaaacgaaaagaaaaaaatagattatgtgtcaagagcagaattattcgagcatggaatggatataaaaaaagagatgtcaagaaaagtcgataaagttgagagcaaagtcgataaaatcagtgaagaagtagttgagctaaaagtattagtaatacctatggtaacatctgcgaaagaaacggccataaacacacaaaagatggcggatacactggaacgatacacgcgatcaacaacaaagcagttgcatgaacatgacttagaaattgcagatgtgaaacactcaatcgataatacattaaaaagcataagcgatgaagagtcagaggagaaacataagaagtttagtaacgttcaaattataacttctgttctagcacttgtagggataattttaggtggaattctaagctgggactggggacaatttatatttaaatgaacaaaggaggtgaactaaatgtcagagcaaaaaacaaactagattcttataaactggatgttggccaagaattagttttataggaggaatagcatgaatatcatgaaaataaattggattgttcgttttaagaatcccgtgtggttgatcgctctagttggcggtctttttttaattgcccaatccgtactctacgtatttggtattgaatgggattacaacgaattattgaataggcttatcactgtaattacttctatctttgctctaatcggaattattcaagacccgactacggcaaacttaaaagatagtgaaagagcacaaaaatataatgaacctggaaaggatgaatagaaatggcaaaagtggcaatttttggaggacataacggaacttatgaacaaggtgcgaatggcaatggacttactgaaaaagcagtggcgaaagaaggcgcgcaaatcgcgacagcatatgctaaaagttgcggtcatgatgtaataaatggtttcggcaaatctttatcagagcgggttaaatacgcaaacagtgagaacgttgtcgcagtattggaactacatgcaaattctggaggtggtcaaggaaccgaaacactattttgcgctggtattgcatcagcccagcaagatgcgattgcagttgcgaaagccggatcaataaaaggcctaaaaaatcgaggcgcaaaagcagacacttctacaagacacgggagactagccattgtacgcgatacaaaagcgcaagcattactacatgagctgttcttcattgattcagctagtgatgtagcgatttggaaaagcaataaaaaagccattatagaatcgatcacaaaagaatggttaaaaagacgaggcttaaattctgttccgaagacaacaacgtctaagcccgctcctattaaaccaacgacaccttctaagccggcaacatcaaataacacttataagaataaaaaactagtttctaaagctgctagtttgagattttatagtaagccttcttgggcagataaagatgtggcgggcactgttaataagggtattggcttcccaacagtagttgaaaaagttaaagttggcacggcttatcaatacaaagttaaaaattcaaaaggcgctactttttacatcactgcaagtgataaatatgtagagcttaaaaacaaataataaacaaaccctcgctttgtgcgggggctttttttatgcaaaaaatacgctaaacaaaagcttagcgcattatttcttcttcgattttgtagaattcatctaacaattcgccaggagtgcattgaaagacctctgctattaaacgcacatttttcgcagatatttggtctacagtttttgagtcagcacttcttattgtttgatgtgcaagtcccgttgcattacctagctggtaaattgtccaatctttactttctaagtattttttaataaatcctgccatttttattattcctccatacgtttatttttagctatgcgctattgttatagtatcgttaatgcaatcttcataaacagtaaatttagttgattcgtttaaatcattcataagattaaaagtatctctatctactacatttattactacttcatagccatcctctaaatcttcaatttcttccttcaaatgcccgtagccccatttttcaaaaatattttttaaattcatcattaacttcctccttttaaattgccaagttatatttatttttgcaagatagtaagtactcaataatcactgatgctgtatatttatcaacttctgtattattcgaactaaggaaaatttctatttcagaagtcgttttccagattttttctgataataattcggtaatgaaattcttctgtctatcagtcattctattcatcatttccactctaatcgcagctgcgttcgccgtatcatcacaagatattaagtattcaataatatttgctgcaacttcctgagttacttcaccatcattatatgattgtaaatcattggttagttcccattctttttctaatagtaattggtctataaattctttttgcttgctagtcatctcaatcaccctttattaatattttatgtttctttactatatacatattatagcgcgatatatttgattagtcaattatatttgagtacgaaaacaaaaaaataccccgaaatttttcgaggttgcagtcatataaaactgcgaatagttgaatgaaattattagatgcaaaaacatctatgcatttattattacatgcccatttatcaagagtcaatgatttaaggtattgcgaataattatacacttttattcatgcgaaataatagatatttggctaaataaggatatttcttataaaaaataacatataatttgaatggatatgtactttttgtgacgagcgcaaaggaaaatgcataaaccgtgaataaccacctgaaatgggtgcttttttgtgatggaaaacacaatattacacatattgtgtaagaatgaatctaaataagctctatttttagtcgttcatgacaagaatcggacatttcattacatttttggttatacattggctttttatgatagactgattttgaaaacaagattatacataaagggagagaaatgattttatgaaaaagccttttttaaaacatgtagtagcaccgataattgttggactattggtaataacgccgattacgcatgtatctgcagcagtaaggaatgttgatacaactccagttattacgcaaaaagaagttgaaagtggtatacaagataacaacaatgaattaccgaacgaatttattgtcagagatcaagtcaacccaagtgaaccagttaatcaagaaagacagctattaaaaagtgcaagtctaggttatgagaaatggaccaaagtatctacaacaagaaaagtttcaaaaggatttatcgcatggcatcctggatggaaaaattatcaatataatgtttctgcttattattttagtaaagcaacaatgaatgtgagcgcgagtattggttatggaaaattcagtatgtctgtatcaaaagcaggctcaaacggacaaattattaaagcgaatccaaaaaagtggacaagacctgcaatatatgggaatgtagatgttacgaagtatactgttaaaaaatataacggcgctggaatttacacaggatcgacaacaaaatacgcaagtactgctacaagtacttatgtccaaagtcgtaataaataaatcgaaaagagagctaatagaatgaagaaaaagtggttaataatactgttggtagtaatagtaatttgcgcttcattattcggaataaagtggttagttgataggaataacattgtaggaatgatacaagttgatggacttgtatacgttatgaccaatgaaccagcaaataaagatgacgctttagagaaaattggagagataaagaataagataaaaaggtataaaacgccagacaaagatttcacatctaataagttagctgaaggatctgaactttataaagcaaaaaatggagaggaccttccaaggactattttgtataaagatgatggcaagtattacgttgcatcagaagctgcggaacagccaaatcaaaagcaatagtaaataacacaactaaatgaatcttatttaaaaagtgtgcttaatagcatgctttttatttttaagagaaacaactatattttattaccacttgattttaagaacgtttgttcgtataatgttcctaaggggtgaagaacatgtataatttaattgatgatattttagaacattcaatagtgttagcagatgcgttaaaaagaaattggtcgatagaaatactgtttttaaagaataatcatcatgtgagatacaagtatgtagttcctgtccacattgacaacaaaaaacacattgtatcacttgaacgctttgacgagcgaataattgatattaatttagacgatattattagttgtgagattatgtcatgagaaaatatagctttaatgatttcgcatacatttgctatattgaggggaagaaaagtgcggtagagaaaattttctcggaaatttttgaatcgaaaaaattaaaagcgttttgtaagaaagtagaaaagaaggatatagatttaaaaacaatttataaagaatacttagatatgcaagtaattaaaaacgattaccaacaaaaaagaagcagatattagtatctgcttctttttataatatttatataaaatagtgtttttgtaaagtacacatcaggttatagtaatatcgaaaaaggaagcgtacggttatcacataaaaatgccgttattttgagtgaggtgctaatgtgtgatttaaagtgtttttatgaataacgcttgttgaaaaataaagtaaaagcacacaaaatgagtgtttttctttatttttgataaaatacacacattgtgtgaaactaaaaaagaggagcaaacaacatgaggaaaaaaactttagtaatgtttcttatttttattgtgttagtttcgttatttatacctactaatgcaagcgcgtattcgagacttggatatgtgatgacaaaggctagcgccaaaaattttaaggtgtatattaatggttcagcgagaggatatagaaatatcattattaacggggcgaaatcttggaatccttctccgtacttgaatacggtaacgatgggaaatgatgtgaagcctaactttactgtcagtagttcaaatacgaacaaaggaagcgtcttagcagtttgtaacacaacttattacaaatctaataaattaatcgtgaagaatgaaattacgctatacaaaggcttccgttcactttcaaataatcataaaatagaaacggtagcgcatgaatttggtcatggctttggtttaggacatgtgaaaaccagaaatgcaatcatgttagataaaggttttatcaataaaactaaaccgcaaaaagacgattttaatggcatcaaagccttatacaagtaaaaaggaggattgacgatgaagaaaaaaataacgatgatcataggcttagtaagtcttagtatattaactgcttgctcaaacagccaaagtgtaaaagaaaaaccatcagaagaaaaagcaaccacacaaagcgcatcagaaacggtcaaagcaaataatggcgttgtttcttatcacggtaagtatcttgaactcgcggaaaatatggatgctttagaaaaagatgccccaattattatcaaagctactaaaaaatccgaaaaaacaacagtgacaaaagaaacgaaagaaaatgtatttccaaccgacttttatacaatgagcgatgtacaaattaattctatcaaaaaagacacaacggaaaaactaacagagaatgcgacaattaaagtgttagagtatagcgtagaaaacgttatggtagagggcaaaaaatatgatttaacaattgatggttataaaaacatggaaaaaggggaagaatatacacttttcctagagaaaaatccggatggcgacaactatatactttcaaatgctataataagtaaatttccggttgaagaagtgggcaaagaggaattattcttagatggcggggaaacaacagaagcaacagaggatatagaagaaatttatcaggaaatctatcaagaagttttaacagaatatagtgagtaaataaagtaatctagatacttgatagacctcgagataaaaatcgaggtctatctttctgcttataaaaattaaagcttattccagacgattttgcgcaatataacaccacaaaactcacttgacagaactaaactatccaagtagaatgaatcaaatccaagtcaacttttttgttgaaaagggttagactttctacaataagggtaaatccagttagaataaataaagctttttcgaataaaaggagataaaacgatgagtgaaagtggtgctttttttccaatgagcgttaaaaaatttatggaaaaagggattgcctcgttgaccgaagaagaaaaaatgagtacgctacattatttggaaaatgcgtatcatcaagaaccatgcaacgaggaaattgtacataggttaattcaattttataatcagacgaataaaaccaaaaaagcgcaagaaataggtcaaaatttcttaacgatgaatggctacaacaaggaaattttaggtgagttatctgtaactttcatgcaagaagataatatggatacttatttcacgttagttcgtcattatatggaagaagaaaaacaggaagatacaaaagaagtcacaaataatgtcattccatttcctaaacaatttgttcctagaaaagatatccgtgattttgcgtcatggcaaacagcggaacaattagagtttttacaagaagctcgttttctagaaattgatgattttttgccggcttttaaaatgtttttagcggacgaaagtttttccccgtttgtgcaatcaatgatctttgagctgatgcaagaaaaagaagtgaatgaagaaatagaagtccgaaaaattgataagcatggtatttttaatccgagtgaggtgccgatgttagccgaaaacgcatttgcaacggaactattcgctggccttgcggataaacttgaacacagtaatccaagtctattagaacaaataattgggattattcaacaacatttatttatgctttatccgtttgagtttgagccaaaagaagtggatgtatgggtgaatgcctactttaaatgggccaactcgatgtacggtgatgttagtctgatttcagatgcagtaaatcaagcagcagttgaagaagcaatttctattattgaggagttagaaatcagacagcaaaattatttcatataatgatatttgttgttttcaagtcagggatatctgtgttattattagtgagtatggctgaaacttgtcatgagagtaattaaattgaactaaatagatgatggagggaattataccatgtcagtaaaatgggaaaaacaagaaggtaatgttggaaaacttacttttgaaattgaacaagaaaaagtaaaagaaggtttagatagagctttcgtaaaagtacgtaaaactcttaacgtaccaggcttccgtaaagggaaagttccacgtcaaattttcaaccaacgtttcggcgaagaagctctttaccaagatgcacttgatatcttgcttccagaagtatattctcaagcaattgatgaagctggaattgatccagttgatactcctcaagtaaatattgagtctatggaaaaaggcgaaacttgggttctaacagcagatgtaactgtaaaacctgaagttaaacttggagactacaaaggtcttgaagttgaaaaacgcgaaacagaactaacaacagaagaattagaagcagaattaaaacaattacaagagcgtcaagctgaattagttgttaaagaagatgctccagctgaaaacggcgacactgtcatccttgattttgaaggattcaaagacggcgtagcttttgaaggcggacaagctgaaaatcattctctagaacttggaagcggtcaattcattcctggttttgaagaaaaattagttggcttaaaagctggcgacgaagctgacatcgagttaacattcccagaagaataccatgcggaagacttagctggacaacctgttgttttcaaagtgaaactacacgaaatcaaaactaaagaagttcctgcacttgacgatgaacttgcaaaagacatcgacgaagaagtagaaactttagatgaactaaaagaaaaaatctctaaacgtctacaagaagcaaaagaagattctgttgctcaagctaaacaagaagaagttattgctaaagctgttgaaaatgcagaagtggatattccacacgcaatggttcaccatgaagctgatcatttaatgaatcattttgcacaagatttacaagcacaaggtctaactcctgaattatattaccaattcactggtcaaacagaagaagcaatgcacgcacaaatggaaaaagacgctgaaaaacgcgtgaaaatgaacctagtgcttgaagctattgctgaagctgaaaacattgagccaactgaagaagctattgacgaagaaatttctacattagctgaaaaatatggtatggaaaaagacgctgttcgtgctgctcttggcgatatgagcgaacttaaatcagaccttaagatccgtaaagctattgacgttttactagatagcgcagtagaaaaataagcaaagaatgatttaataatttcattaaaaaatgggggacatgagttatactcgtgtccttctgattgtagaaataaggatacagatgattggcatttctaattaacaaatgatattattaacacacataggagatgaaaaaatcgcctataagcaacatacctatgcgaaggggtgaaatattttgtttaaatttaacgacgaaaaaggccaacttaaatgctccttttgcggaaagactcaagatcaagtacgtaaattagtggccggtccaggtgtttatatttgtgatgaatgtatcgagctttgtaatgaaattattgaagaagagctaggtatttctgaatttgttgattttggcgaagtgccaaaaccacaagaaatccgtcatatattaagtgactatgttattggtcaagagcgagctaaaaaagcactcgctgtagcagtttacaatcactacaaacgaattaattccaatgaaacaaaagaagacgaggtagaactgtcaaaaagtaatatttgtttaattggtccaacaggtagtggtaaaacacttcttgcccaaacactggcgcgaattcttaatgttccgtttgcaattgcagatgcaacttcacttacagaagctggttacgttggggaagatgtagaaaatattcttcttaaactaattcaatctgctgactatgatgttgaaaaagcagaaaaaggtattatctacattgatgaaatcgacaaagttgctcgtaaatccgaaaacccatctattactagagacgtttccggtgaaggcgttcaacaagcattactaaaaattctagaaggcactgtcgcaagtgttcctcctcaaggtggtagaaaacatcctcatcaagaattaattcaaattgatacaggaaatattctatttatcgttggtggtgcatttgacggaatcgaacaaatcgttaagaatcgaatgggtgaaaaagtcattggatttggaactgataatgcgaaactaaaagaagatgaaacttatttatcccgtgtcgttccggaagatttactgaaattcggcttaattcctgaatttatcggtcgtttgccggttatcgcgacgcttgaacaattagatgaagcagcacttgtttccattttgacagaaccgaagaatgctttagtaaaacaatacaaacgtatgttagagcttgatgacgtagagcttgaattcgaaccaacagctttaattgaaattgcgaaagaagcgattgaacgtaaaactggagcacgtggtcttcgttctatcattgaacaaatcatgttagaagttatgttcgaaatcccttctcgtgatgacattactaagtgtattattactgagaaagcagcgcgcggagaagaagagccgcaactgcaattagaggatggctccattatccctattaaaacatcagcatgattcgaaatgcgcgtcgtaattggcgcgcattttttctatcaatctagcttgttttactgtaacatctagcttgtttcgtgctatactttattaataataattggagaggataaaaagacatgaaaagtgaaaataaatttttttctggggcatttggatggataaaaataattatcattgcgctcatactcgctttcggtattcgctattttttaatttctccagttactgttaatgggaaatcaatggatccaacactacatgacggtgaacatctatttattaacaaaatatcagatccaaaacgctttgatattattgtatttccagctcctgatgaagaaaatgcagaatatattaagcgcgtaatcggacttccaggagataaagtggagtataaagaagaccaactttatattaatggtaaaaagtatgatgaaccgtatttagattctgagaaaagcgctttaacaggtggttatttgactacagatgataagggcgatcctaacttcacaatggctgatattccgtactctgacggctctcttactgttccagatggcaaactttttgtgttaggggataatcgtcaagtaagtaaggatagtcgctatatcggcttcatatcgcaagacacagttcttgggaaagtaatttcgtttggaaagtctttgcagcgataatttaaacccgcgaagagttctaggaggagacatagatggcagattatttggaagaaaagcctaagaaaaaaagtggggcgcatcaattattaagctgggtgcttgtcatcgtagcggcacttttaatagcattagttattcgtaattttgttattgcaccagtaaaagtagaaggaacatctatggttccaacctatcaagacggcgaccgaatttttattgaaaaaataacaaatccagatcaatttgatattattgtatttgatgaaccaccaatgattggctcaggtgaacattttattaaacgtgttatcggtatgccgggagataaaattgcttttaaaaatggcgaattatacttaaatggcaagcgaaaagttgaaagttatttgccagaaggaacactaacactatggaacccggaccccacccaaaagccttacatagcggattatacgttagaggatatgacgggagaaagtacggttcctaaaggcaaactatttgttcttggggataatcgcggtggtagttcggatagccgagtttttggatttattgatgacaaaactgtaaacggcactgtaattcaatttgggaaataataagaaatccgtgaaagttactttttcgcggatttctctattaaatgaaagttttttcgtttataatgagactgttagtaaaaaatagggcggtgcagttttttgaaggagaagaatttaaagcggttatggtcttggatttgggcggctgttttagcagtgttattagctgttataatccgtttttatttgttcgtgcctattcttgtggatggaatttcgatgatgcctacacttcatagtgatgaccgtgtaattataaaccgttttggcgaggtagatcgttttgatgtaattgtttttcgtgaagcagatggaaaagaatacattaagcgagtgattggtttacctggcgatacggtagaatataaagcagaccaactttacatcaatggaaaaaaatatgatgaaccgtatttagatacttacaaagaaaagctgaaagatggctacttaacagatgattacagttctaaagaccaactagatggcggcaaaattccaaaagatacctattttgttttaggtgacaaccggagagcgagtaaagacagccggataataggaccgattccgctaagtaaggtactcggaacaacaccaatttgttattggccaattgaagatgcaaaactaatagattaggagtatatgatgacaattcaatggtttccaggtcatatggccaaagctcgtcgtgaggtgacagaaaaattaaaactagtagatgtgatttttgaattagtggatgcacgtatcccgctatcctcatccaatccaatgctagaagaaattatccaccaaaaaagacgagtgattattttaaataaagcagatacagctgatgagaaaacaaccaaagaatggattgattattttgctgagaaaggcttaccagcagtagcagtaaatgctcaagaaggaaaaggcctattcaaaatcgaacaagcggctgaaaaattaatggccgaaaagtttgaacgtttaagaagtaaaggaatgaaaccaagagcaattcgcgcgatgatactcggaatcccgaatgtaggaaaatcaacattgattaatcgtttggcgaaaaagaatattgcgcgaactggtaataaaccaggggtaactaaagctcaacaatggatcaaagtagggaaaacattagaacttcttgatacaccaggaattctatggcctaaatttgaagatcaagaaataggatataagttagctttaacaggtgcgattaaagacgatttattacaaatggaagaaattgcgggttatggattacgtttcttagaaaaacattaccccgatcgccttcaaaactggctaaaagtagagaaagtttcagaagatccaattgaaacactagcttttatagctgaaaaaagaggacttctagatcgttataatgatcctgattattcacgcgcagctgagactgttgttcgagaaatccgtcaacaaaaattaggaagaatgtcttttgatttccctaattgggaagacgatgctgaatgagtgaatctatcgctgttatccgagaaaaactcagcctagtgacctcagaacaagaccctttttttcaactttgcactcaagacgaacgaaaaggtgtacagaaacttcttcaatcgacccgaaaaaaatgggaaaaagaagcaaaattagctgcaaaattaatagaaatgaaacgctatgaaacagatctttttaagcaaggttttcagtatatcgctggtgtagatgaggtggggcgcggtccgctagcaggtccagtagtggctgctgcagtcattttaccagctgatttttctgtcgttgggatcaatgattctaaacagctaaatgaggctaaacgagatatactttttgatgttataaaagaagaagccatctccatcggtatcggaattattgaccatgatgtaattgatcaagtaaacatctatgaagcaacaaaaatagctatgcgcacagctttagaagagttgaatccagcgcctgacttcgtcctaattgatgcgatgccactgaaatattctgaatcagagttatcgcttataaaaggagatacgaaaagtatttctatcgctgctgcctctatcatcgccaaagttacaagagatagaatgatgcaacagtatgatgaattatatccagggtatgattttgcaaacaatatgggttacgggacgaaaaaacatttgaatggcttagatactatcggaatttgtccaattcacaggttaagcttttctcctgtaaaagaagcaaagttacattttgagagtctaaaatagctaaatacttaaagcaaaagcgtattttcttaatagaaagtacgcttttttgagctgaaaagaaaattttaccgattttacaaaaagagctaatctttgtacacttgtgaataactatcacggaggtgcagaagatgaactttaaagaacgagaaacttggttaaaaatcgcttcatgtaaatctatttccgctaaaaaaagggcagttatctggcaaaaaattaccacttttaattgttgggagatgtcgattgaacagattgcaactcatttttttactgcggacaaaaaagaacaaataattactgaattagaggaagcagcaatttattcgccagaagaagcgagtgtggtctgtattcttgatgaaaactaccccgagttacttaaagaaatatatgaagcaccaccgcttttgttttataaaggaaatctagacctattaaaaaaacaagctattgcaattgtagggacacgacgaatgagtgagtatggtagaaaagcatgtgcgtcacttgccgctgaactttcaaatcatggctttgcgatagttagtggacttgcgcttggaatagatgctgaagcgcacaaagctagcctccgtaatagcggcgccaccattgcagtacttggatctggagtaaataaaatttatcctcggacgaatgaactactagccaaagaagtaatcacgcaaggtttacttcttagcgagtatttaccaaatgaagaagcaagaagatggtattttcctgagcgcaaccgtattattagtggcttagctcttggtacggttattattgaagctgccgagagaagtggatccttaataacagctgactttgctttggaacaaaatagacaagtttttgcggttcccggtaatatttatattgatacttggagaggtacaaaccgtttgattcaagaaggtgcgaaattagttttaaatgcaaacaatataatagaagaattttttcaaattaagccataaaagtagtcaaattatcctttttaagtgatttgacttgcaattcctgattttttaagataagtttgctaaagaaagctgttttacaacacataaaatggattttttaataaaagtcattgacaaacccagtaggaagggctaatatttactactgaattatgtgaaaagtcagcatgcaaacttattgaacgcgaggctaagactgtaatagtataatagcaactagttaagcccgtgtattgacccaaatcagggaggaatatatagatatggcagattatttagtgattgtagagtcacctgcaaaagcaaaaacaattgaaaagtatttaggaaagaaatttaaagttaaagcttcgatgggacatgttagggatttaccaaagagtcagatgggtgtagatactgaacatgactacgaacctcgttacattacgattcgcggaaaaggccctgttttgaaagatttaaaacaagcggctaaaaaagcgaaaaaagtctatctcgcagccgatccagatcgcgaaggagaagcaattgcatggcatttagccaatagtcttgatttagatcaatcagataaattacgtgtggtgtttaatgaaattacaaaagaagctgtaaaagaatcattcaagacaccaagaaaaattgatatggaccttgtgaacgctcaacaagcacggaggattttagaccgtttagtaggttataatatcagtcctatcttatggaagaaagttaaaaaaggtctaagtgcgggacgtgtgcaatcgattgcgctacgaattattattgatcgcgaaaaagaaataaataatttcaaaccagaagaatattggacaattgacgggaacttcctaaaaggtaagaaaaaattccaagctaatttttatggcgtgaatggtaagaagagaaaactttccactgctgatgacgtaaaagaagtaatgtcagcaattaaaggtaaaacatttgatgtaactgacgtaactaaaaaagaaagacttagaaacccagcagcaccatttactacctcaagtttacaacaagaagcagcacggaaattaaattatcgtactagaaaaacgatgatgcttgctcaacaactatatgaaggaatcacacttggaaaacaaggtacagtaggtctaatcacatacatgcgtactgactctactcgtattgcagattccgccattctagaagcaagtaattatattaaagaaacatacggagctgaattttcccgtaatcataaacggtctgataaaaatgctaaaggcgcacaagatgcccatgaagcaatccgtccaacaagcgctatgagaagtcctcaagaagtgaaagaatatctaactcgagatcaacttcgattatatcgcttgatctgggaacgttttattgctagccaaatgacaccagctgtcctagatacaatgcgagttgatttggataataatggtgttaactttagagcaaacggatcgaaaatcaaattccatggttttatgaaagtctatgttgaaagtaacgatgataatacggaagaaaaagaaaatattttaccggatttgaaaaaaggagacaaggtgcagtccgaatcactcgaacagcgtcaacatttcacacagccacctccacgttacacagaagctagattagtaaaaacacttgaagaaattggtattggtcgaccatcgacgtattcaccgacattagatacaatccagcgtagaaattatgtttcgctaacaaataaacgttttgttccaactgaacttggtgaaatcgtcaatgaaatgattgaggaatatttccctgaaattttagatgtgaagttcactgctaatatggaaagcgaattagatgaagtggagcacggtgaagttgaatgggtcaaagttatcgatgagttttataaacaatttgaaccaaacgttattaaagctgatgccgaaatggaaaaaatcgaaattaaagatgaaccagccggtatcgattgtgacctatgcggggcaccaatggtatacaaaatgggtaaatatggtaagtttcttgcgtgcagcagatttccagattgccgaaatacaaaagcaatcgttaaagaaatcggcgtgacttgtccgaaatgtgaaaaaggacatgtaatagaaagaaaaagcaagaaaaaacgtattttctacggatgtgatcgctatccagattgtgattacgtttcttgggataaaccagtcgaaagagcttgcccgaaatgtaataagcgtgcattagtagagaagaaattgaaaaaaggcgtacaagtacaatgtacaaattgtgattataaagaatccacacaacaataaatggaaaaatggcagcactcggatagttcctgtgttgccattgttgcgcgaggaggcggacaaatggaaaaaagtgttaatgtaattggagcaggattagctggcagtgaagcagcttggcaacttgtaaaacgaggtgtaaaggtagatttatacgaaatgagaccggtaaagcaaacaccagctcatcatactgataaatttgcggagttagtatgtaccaattcactgcgagctaatggcttaactaatgcggtgggcgtaattaaagaagaaatgcggttacttgactcgattattattgaatcagctgacaaagcttctgtgccagctggaggagcacttgcagttgatcgccatgaattttctggctatatcacggacaaagtgaaaaatcatccactcgttacaattcatactgaagaagtcacatctattccagaaggaccaaccatcattgcaacaggtccactgactagcccagctctagccgaagaaattaaacgcttaacgggtgaagagtatctttatttttatgatgcagcagcgcctattattgaaaaagatagtatcgacatggataaagtatatttaaaatcaagatatgataaaggggaagcagcttatctaaactgcccaatgtcagaagaagaatttaacactttttatgaagcattagtaactgccgaaacagccgcattaaaagaatttgaaaaagaggttttctttgaaggatgtatgccgatagaagtaatggcaaaacgtggtattaaaacaatgctatttggcccacttaaaccagttggattagaagatccaaaaactggcaaaagaccatatgcagtgttgcaattaagacaagatgatgcagcagggacgctttataacatggtaggcttccaaacgcatcttaaatggggcgaacaaaaacgtgtatttggcttaattccaggcctagaaaatgcggaaattgttcgttatggagtaatgcaccgaaacacatttattaactcaccgactgtacttgagccaacctatcaattgaaaacgagaaatgacttatttttcgctggtcaaatgactggtgtggaaggttatgtggagtcagcagctagcggacttgcagcaggaatcaatgcagctaattttgtacaagacaaagagccgattgttttccctcctgagtctgcgattggaagtttagcaaattacattacaagtgctagtaagaaatctttccaaccaatgaatgtaaatttcggtctatttccggagttaccaactaagattcgcgctaaacaagagcgtaatgaaaaattggctgaaagagcattagatgcaataaaaaaggttgcagaacaactttaaaaacactataataattgaggactattctttgctgttcttttcatcacgattatcgcttttatatttttaagagattcgatagtgatgaaaaggcagtttttctttcgagtgaatggtctagacaaatcacgttaataaatgttgactttttcacataaaagcttagattaaattgaattgattataaatcctgattaattcgaaaagttgcgaaaaatgtataaaattattgcaacgtgcatattcttatgttaacatgatagtgtttgagaggtgtattcgcatgacgcaagaggggcagttagagaagcgatttcttgactatcttcactcagaacgaaattattcagaacatacaagtacggcttatgaaaatgatttaagtgattttcgtcgcttcttaaatgaacaagctattatagagtatcaacaagttacatttttagacgttcgaatttatttaactgaattaaagcaaaaatctttttctagaacaactgtagctcgaaagatttcaagtttacggagtttttacacttttcttttaagggagaatgtgattactgaaaacccatttacctacgtttcacatgcgaaaaatcagctaaggcttcccaaatttttctattcagaagaaatggaagctttgtttcaagtggtttatgaagataatgaaacgcttacactgagagatcgagtgattttagaggtgctctatggtactggaattcgggtgagtgaatgtgcaggaatcatgctttctgacttagatacatcttatcaagcaattctgattcgaggaaaagggaataaagaacgctatgtaccgtttggtgcctatgcggaagatgcgataacagattatttaagtgggcgaatagaattaatgactcgtttcaaaaaaacgcatgactcattacttattaatcattacggagatccgcttacaacaagagggattagatattgtttaacgaaaataattagtaaagcttcattaactcgaaaaatccatccgcatatgctacgccacacctttgcgacggacttacttaacaacggtgcggatatgaggacggtacaggagttgcttggacatgctagcttatcatccacccagatatatacgcacgtgacaaaagaacatttaaaatctacttatatgaaacatcatccgagagcttaaatttggaggaggttaaggaaaatggaattacatgctactacaatttttgccgtgcagcacgatggtaaagctgcgatggctggggacggtcaagtcacgctcggggaatcggtagtaatgaaacacactgccaaaaaagttcgccgcctttttcatgataaggtaatagctggttttgctggatccgttgcagatgcctttactttatttgaaaaattcgaagcaaaattaaatgaatataatggaaacttagaaagagctgctgtggaactcgcgcaacaatggcgaagtgatagtgttctacgtaaattagaagcgatgttgatcgtaatggacaaagatacattgttgttagtttctggaacaggtgaagttattgaaccagatgatggcattttagcaatcggttctggtggtaactatgctctagctgctggtagagcgttaaaaagacataatggcggacaaatggaagctaaagacatagctcgtcatgcactggaaatcgcttctgaaatttgtgtgtttacgaatgaccatattacagtagaagagctttgaaggagtggttaatttgacaaatttaacgttaatgaaccagttgacaccaaagcaaattgtcgaaaaactggatcaatatattattggacaaaccggagcgaaaaaatcagttgctgtagcactaagaaaccgctatcgtagacaactgatggatgaatctatccgagatgaaattattccaaaaaatattctgatgattggcccaactggggtaggtaaaacagaaattgcacgccgaattgcaaaaatcgttcgcgcacctttttcaaaagtagaggctactaaatttactgaagtcggctatgttggacgcgacgtggaatcaatggttcgcgatttagttgaagtgtcagtacgtttagtaaaagaagaaaaaatgcaattagtacgtgtgaaagctgaaaaaaatgccgaaaaacgactaattaaattactagcaccaagtcaaaagaaaaagcaaacaacatcacaaaatccactagaggcgctttttggcagtatgaatcaacctgatgaacctgctgaggaagaagtagaccaagaattaaagaataaaagaagccaaattgaatggcgccttcaaaacggagagcttgatgatgaaatagtaacagttgaagtaaaagagcaacaaaacccgatgtttgatatgatgcgtggaactggaatggaccaaatgagcggcatgcaagatgctctttcaggtatgttcccagcgaagaagaaaaaacgcaaagtaaccgttcgtgaagcgaagaaaattctttttgaggatgaagcatctaaattgattgattcagatgaactcgcagcagaaggaattcatcgcgcagagcaaatgggtatgattttcattgatgaaattgataaaatcgctagtaaagaaggcggcggaaatgcgcaagtttcccgtgaaggtgttcaaagagacattcttccaatcgttgaggggtcgcaaatttctaccaaatatggtacagtcaacacggagtacattttattcattgccgctggagcttttcatatgtctaaaccaagtgatttaattccagagcttcaaggtcgttttccaattagaattgagctggataagttaacacaagaagatttctacaaaatcttaacagaaccagacaatgcgctaattaaacaatacaaagctttactcaaaacagaaggaatagacttgatttttacaaaagaagctgtagaaagaatcgctgagattgcattccaagttaatcaagattcagataatatcggagcaagaagacttcataccattttagaaaaattactagaggatttactttttgaagcacctgaaattaatatggaatccatcaaagtaacagaaaactatgttaatgaaaaacttgcgccaataatgacgaataaagacttaacacaatttattttataaaatactaggaggatctaataatgactttattagaaaaaacaagaaaaattaatgctatgttacaaaacgctgcaggtaaaacagtaaactttaaagaaatggctgatactttaacagacgtaattgaagcaaatacgtatatcgtaagccgtaaaggtaaattacttggttattctgaagcattaccaatcgaaaacgaccgcatgaaacaaatgcttacagaacgccaattcccagaagaatatactcaaagtttatttaatgttggtgaaacttcttctaacttagaagtatcaagtcaatatactgcttttccaatcgaaaacagtgatttgtttactaaaggtttaacaactatcgtacctatcgttggtggtggcgaacgccttggaacacttatcttatctcgtttagaaagcaatttcacagacgatgatttgttattagctgaatacggcggaactgttgttggtatggaaatcctacatgaaaaagcagaagaaattgaagaagaagctcgtagccgtgcagttgtacaaatggcaattagctctctttcttacagtgaattagaagctattgagcatatttttgatgaattaaatggtaaagaaggccttcttgttgcctctaaaatcgcagaccgtgtcggcattacacgctctgtaatcgttaatgcgcttcgtaaattagaaagtgcaggcgttattgattctcgctcattaggaatgaaaggtacatttatccgtgtactcaatgataaattcctagtagaacttgaaaaacttaaaaataactaaaaaaccaaaaaagctttctctgaaaatattcagggagagcttttttttaattgctttggtaaaataagaaggaagaagtagttgtgactggaggaatttagaatggaaattgctgaaacaaccattgaagtacgctatgcagaaacagatcaaatgggggttgtttatcataataattaccttgtttggatggaaattggtcgaacaagattaattgaacaattaggttttcgttattttgatatggaagaagcggggtacctttctccggtattagatgtgcatattcattacggaaaaccactgcgctacggacagaaagcagttgtaaaaacatggataaaagggtatgatggacttcgtgttacttatggttatgaaatttgctatgaaggaacaaatgaagtagcaataactggagaaacagagcatgtttgtgtaacaaaagaagattttcggcctgtttcgttaagaagaactttcccgaattggcatgaagcctatctaaaagctttagaataaataagactggtagtgatgaaaaatggcttttggtgtaaaacgcgatgaaatggaattatggaaagaaaaagcagctcgtggcgagattgcgattattacgcattactggctagatgatcgttttcctgattcaaaaacagtaaccaaagttgcatgtgtcgatttgaaaaaactgcaagaatggggaaaacaatatggtttagcgccagattggattgataaccgtcgaaaaaactttccgcattatgatttgtttggcgagatgcaactcgttgtactaaaaaaagaaaaagcctttgaacaaatcgagcggtttcatttggaggagaaataacaatgattaaactagaaaatgaattactacttgtagaaatgaaagaagctggtgctgaattaacacgaattttccacaaagatactaagttagagtatttatggaatgcagatagtaccttttgggggcgtcattctccggttttattcccgacggtaggtagacttgttgaggatacttattttgtagatggtaacccgtatcacttagggcaacatggctttgcgcgggatcgtgattttaaagtagtggagcacacagaaaacgctgtacgctttgaactagatgcggatgaagattcattaacgatctatccgtataaatttaaattatcgattatttatacaatagaaaaagattcagttgcggtttcttatgaagtggaaaatacggacaataagcgcatctatttctccatcggggcgcatccagcctttaatttaccacttgctgacggaactacatttgaagattattatttggattttggaacagaagagaatctcgaaacactttgtctggaaggcccttatcgcagtggtaaaattgaaaaagtagtcaatgaaccagcaagatatttgccactaagctatgatttatttaaaaatgatgcactgatttttgaaggattaaagcaaaaagaaattacgattaaatcagacaaaactccacattttgtaaaagtgtcatttccagagttcccgtttgttggggtttggacagcaaaagcaggaacgcctttcttatgtatcgaaccttggtacggaattgcagatggtgctggaaaatctgttgagcttcgagataaagcaggtattgaacatttagaaccagaagcagttttcgcttctgaatataaaattactattggttaaaataaaaacccagcagagctaaataactctgctgggtttttattacatccattttatttttggttcttcgccgtttcgaatgcgcgtaatatttgctcggtggcgccaaataacaaagagagcgatgcaagcaacgaggataattaaaatccagtctcccatgaaaaaagaaataattaatgctgcaagtgctccaatcattgaactaagcgacacatatttgctgatttttaatgttaataagaaaacgactagtgctgctacaaacaaaagtggtgcataagcaaggataacaccagcagaagtagcaactgctttcccacctctgaatcctgcgaaaagcgggaaactatgtccgataatcgcaaatgctcccgtaagtaaccagaaatgatgattaacatttagttggaaaaagaatggaagtaatgttgcgacagtaccttttaaaatatccatcactgtaacaatactgcccgcttttacccctaaaacacggaaggagtttgtagctcctaaatttccgctaccaaaatcacgaatatcttttttgtaaaaaattttaccgatccataagccagaaggtattgaaccgattacataagctaacaaagaaagcaaaattaaattaatagtcatttttaaacccctcaagaagaaatgatgttttccataaagaattatagcataaaaaaaagatttttggctaaattgttctgataaaacacgatgaaaagttgaaaaaaccgcaaaaatagcttatgattagaaagaatagtagggggcgattagactaatgcaaaatccaacaaaagaggaaatagcgcatattttaagagaagcaaaagtaatcgcagtcgttggtttgagtgataaaccagaccgcacaagttaccgagtaagccaaatcatgcaacaagctgggtataaaattattccagtaaatcctaatgcaaatgaaattcttggagaaaaagctgtaaagagattaactgacattaaagaacacgttgatattgtgaatgttttccgtcgctcggaatttttaccagacatagcgcgggaattcgaccaaatagacgcagacgtgttttgggcacaacttggcattgttaatcaggaagcatttgattttttgacagaaaaaggatattctactgtcatggattattgcattaaggttgcttatcaagaaatggattactaacaaccatttttgaaagaagcaggttcttatagcagagcctgtttttttatgaaaaagaatttgtcaccaaactatcactttattaattagctggttaatgctattctgataaggtggttttaagcgaagaacaacgtaaagttgcagattgatggaatgaagggagttttgaaatatgaatcggaatgagtataatgatgattctattcaggtgcttgaaggactggaagcggtccggaaacgcccagcgatgtatattggttcaactgatgtacgcgggctgcaccatttagtatatgagatagtagataactcggtcgatgagacccttgcaggatttggtaaaaagatagttgtgacgcttcatgatgatggtagcgttagtgttagcgatgaaggccgcggaatgccagttggaatgcataaaactggtaaatctacggtagaagttattttgaccgttcttcatgctggcggtaagtttggccaagaaggtggctataaaacaagtggaggacttcacggcgtagggtcttctgttgtaaatgcactttctgaatggctagttgttacaatcaatcgtgacggcgcaacataccagcaaaaatttaaagatggcgggaaaccagatggaacacttaaaaaaatcggcaaatctaaagccactggtactacgattcgctttaaaccagatccagccattttcccaacaacttcctttaattatgaaacattatccgaacgtttaagagaatcagcatttcttcttaaaggcatgctaattcaattagtcgacgaacgtgttggtatggcagagtctttccactttgaagaaggtgtgaagaactttgttgaatatattaatgaaggaaaagatgtacttcacccagtagtcagttttgaaggagaaaatgcgaccattgaagtagaaatggcgttccaattcaatgatggctactctgaaaatatcttgagttttgttaataacgttcgaactcgtggagcaggttcgcatgagtctggaatgaaagctgcgatgacacgtattttcaatgactacgctcgtcgggtaaacttactaaaagaaaaagataaaaatcttgagggtagcgatattcgcgaaggcttatccgctgtactttctattcgcgtaccagaaaaaattcttcaatttgaaggtcaaacaaaagagaagctagggacacaggaagcgcgtcaagcagttgatgcagttgtggcggaacatttagcttacttccttgctgaaaacccagaaacaagctctcttctagttaaaaaggcagttaaagcaagagaagcaagagaagcagccagaaaagcccgtgaagaaacacgtaatggcaagaaaaagaaacgttcagaaacacttctttctggaaaattgacaccagcacaatcaagaaaccctaacaaaaatgaactgtatcttgtcgaaggagactcggctggtggatctgccaaacaaggtcgtgaccgccgtttccaagcaattttgccacttcgaggaaaagtaattaataccgaaaaagcaaaattacaagatattctaaaaaacgaagaaattagtaccattattcatacagttggtgctggagtcggtactgagtttgatgttgaggactgtaactatgacaaagtagttatcatgaccgatgctgatacggatggtgctcacattcaagtactattattaacatttttctaccgttatatgcgacctctcgttgaagcaggaaaagtctttattgccttaccaccactttacaaagtaagccgtggttctggtaaaaaagaagtgattgaatatgcctggacagacgaagaattagatgcagctattcaaaaaatcggtaaaggctatatgattcaacgttacaaaggtcttggggaaatgaatgcagaccaactttgggaaacaacaatgaacccagatacacgtacgttaattcgtgtgcgcgtggatgattccgcacgcgcagaacgacgcgtagcaacactgatgggcgacaaagtagaaccaagacgtcagtggattgaaaaacatgtggagttttctatggaagataatcaaaacattttagaaaatgaaaacatgatggttgaggaggcgaaagacatttgagtaatccagaacaacatatccaagacttagcacttgaagaagttatgggcgaccgttttggtagatatagtaaatatattattcaagaacgtgcgcttccagacgtgcgagacggtctaaaacccgtacaacgccggattttatttgcaatgaatgtcgaaggaaatactgctgaaaaaggtttccgtaaatctgctaaaacagtcggaaacgttatcggtaattaccatccgcatggtgattcttccgtttatgaagcgatggtacggatgagtcaagactggaaagtacgcaatatgcttatcgaaatgcacggaaataacggtagtgttgacggtgatccaccagctgcaatgcgttataccgaagcacgtctttctccaatatcagctgaactattacgtgatattgaaaaagaaacagttgattttatcccaaactttgatgatacatccagtgagccaactgttttaccagcgcgttttcctaaccttttggtaaatggctcaactggtatttcggccggatacgcgacagacatcccgccacacaatttaactgaaattattgaagcagtaattaaacgtcttgataagccattttcgacaacagaagatattatgaaaattgtcaaaggacccgatttcccaactggtggaattattcaagggattgacggaattcgtaaagcttatgaaacaggaaaaggccgcgtagttgttcgttctaaaacagagattgaagatattcgtggcggtaggaagcaaattaccattcatgaaattccatatgaagtgaataaagccaatttagttaagcgaatggacgaacttcgtattgagaaaaaaattgaagggatttcagaagtgcgcgatgaaactgaccgcactggactgcgtattgccgtagaacttaaaaaagatgcaaacgcggaaggcgtactgaattacctctttaaaaatacagatttacaagtaagttataattttaatatggttgcaattcataataagcgtccggaattaatgggaattatcccaatgcttgatgcttatatcgaacaccaaaaagaaattattactaaacgttcagaatatgatattcgaaaagcacgcgctcgccaacatattttagaaggcttaatcaaagctctttctattttggatgaagtgattaaattaattcgtggttctaaagataaacgtgatgcgaaattaaacttgcaaacaacatacgatttcagtgaaaaacaagctgaagcaattgtatccttgcaactttatcgtttaactaatacagatattcacgaacttcaaagtgaagcaaaagaacttgcagaacaaattagtattttagagaaaatccttggcgacgaagcagaacttgttgcagtcttaaaatcggaattagctgatattaagaaaaaatacaaaaccgctcgtcgaacagaagtacaagcggaaattacagaaatcaaaattgacacagaagtacttgtggctaatgaagatgtgattgtttctgtaacaaaagaaggctatgttaaacgcacaagtcagcgttcttatgcggcttcaaatggtgcagagttagcaatgaaggaagcagaccacgcgatcttcattcaaaaaatgaattctcttgattcgttaatattatttacaaataaagggaatttcatttatcggccagtacatgaactacctgatattcgctggaaaaaccttggcgatcacgttagtcacttagctagtgatttatctgcaggggaagaaattcgctctgttatcgctatcgattcctttacagaacaaaaacgatttttatttgtcaccaaaaacgggatgacaaaacaatcgactattacaaattacaaaccgcagcgttattctaaatcaatgatggccattaagttaaaagaagatgaacttttgaatgtatatttaattgatggcactgaagatatttttctagctactaggaatggttatggattacgttatccaatcgctgaaattcctgaatcaggggctagaactgcgggtgttaaagcaatcaatctgaaacaaggcgacgtagttataggcggagtggtccttacaccgaatgataacaaacatatcttattagccacacaacggggctccttgaaacaaatgaaagcaagtgaatttgaaccaatttcaagagcaaaacgtggcttactaatgcttcgcgaactgaaaagtaatccgcatcgtttcatcggtctgacgcttgctgatagtaaagaccacttgtttattgaaactaacagagaacaaattgtagaaatagatgtagcaaaccttcgtgtaacggatcgttattctaatggctctttcgtattagatgaaacgatggaaggtgaaccaacttctatctggctagatataccagaaataaaagatacaacagacgctaaagacgaataaaagtaagaatcctcgcatagaaaatatgcaaggattcttttttttgatataataactaagaataaaaggagggtacaatgatggcagaaaaaatgaacgtagaaagttttaatttagatcacaccaaagtaaaagcgccttttgttagacttgctggaacaaaagttggtgtgcatggggatgagatttataaatatgatgttcgctttaagcaaccaaataaagaacatatggaaatgcctgcactgcactctctagaacacttgatggctgaacttgccagaaaccacaccgataaattagtcgacattagtcccatgggctgccagactggtttttatatgtcatttatcaaccataatgattatgatgatgctttagaaattttagctactactttaacggatgtattagccgcagattcggttccagcatgcaatgaagtacaatgcggttgggcagcgagtcatagtttagaaggtgccaaagagcttgcagaagaattcttagcgaaacgaagcgaatggaaaaatgtctttggtgaataagcggaaaaatctctctatgtgaatagggagtttttttcttagtagagacctttatcggtatatacttgtttttttgaaagcgtattccatcaaaaagtcacattttcgccatattttatgattcgtttactactcaataaaatactcttccaaagctcattattaagccattcctcttgattagaatagttcttttttaattatatgattaatatatcgtggaatgttcacaatttgtccattggtatttggtctataccggactataatttacattgttaagacgagcagacagccgttttagacgattacatttgtaattaatctaagtacagagaggaacaacagcgtatgtcgattaaatctaaaattatgaaagtcgggatttgtagtgccatggttatggtaccactatctcaagtttctttacctagttttgccgcagaagaacaaggattacaagcaagtcaagatgtagtaaatattccagatccagaactaaaaaaacaattaaattctcatatgtcgaaaccagctactgctgatattacagaagatgaaatgagtaggctagataatgtttcattaagttcaggtattactgacctaactgggttagagtatgcaaagaatattactagaatatcattccgtggtataaatgcttcctatgacgtagtaacaaaacttcctaaacttaataatttaactatcacaggttctaatattacttctgataaaattcctaatctaaatagtatgactaatttagaaaatttatatttatacgaatcaaattttgacaattcgttacttcctaaaattaacgcgcttcccaatttaaaaacccttaatataggttataataagcaaataactaatattagttcattaaaaagccttcccaatttaaccgatttagtagttatgggctgccaaattgacgatttcagagggattgcagattttccgaaattagaaaattttaatggtacttatcaaagatttgaagatgaagcaagcaagagtcttaaaagtagtgagctaacatttaatgaagcagaacaaacactatttatcccatttaaaattttggaaaaacaaacgatttataactacgatggaaccattttaccctacgatacaaatcctgctaatttaatgattgaaatagattctggttatgaatttacggatgataaaactactatttcacaagaaggcgttacactaaagaatttttccaaagaaaattatgatggcatggaaatgttatatatagtcgctatgttcgatggaattaacattgcaacaccaccaaatttagctaatggaacatataatataactggaaatctttctggtggattatatgacgtcgatcattctgtaagtattgaagcagatgataatgtatcttatacgcaaggacaaaccgtaacaccagaacaattcttaaaagatattaatgcaagtgccaatggtggaacaattacaagcgactttgcagataaagtagatttctccacaccgggaacttatacagttactttaaatgcatcaaattcagttggtttaacggctgatccagtgcaagtaaccgttactatcgttgaacaaacagtgattactgcagaaacagaagttagttacaatatgaatgacgcaaaaacagaagctgaatttttagcggatattaatgctgtaacgaacaatagtgctgcgattacgacagactttgatacagttgttgatttaacaacagctggtgaatatacagttacactaaatgcgggaacagcgaaacaaaaagcaacaccatttaaagttactgttaaagttgtagatccaacaccggcgccagcaccagatccaacgccgacaccggatccaacaccgtcaccagatccaacaccaacaccagaccctgcatctgaccctgatccatcaaacgatccagcgccagcagaagatcctggaacatccattgactcaacgggttcaatggactcaactgatccagctaattcaacatcagaagattcaagttcttctactccgaaagctagtaaaaaagctaactctggtaactcaacattagtaacagccagcaaagcaagtttaccaaaaacaggtgattctttacctgtaactggagtagcagtaggattcttagttttaggattaggcgttctaattgctcgtaaaaaataataacaaaaaactactcgctcaaaatagtggcgggtagtttttttggctatcaatatacaaggtttaaatatagtaaacaaaaaagctgcccgtattagggcagcttactattttttcattacacttgttaacatcgcgacataggcttgagcacctgatttagttaaatgaacaccatcaggagcgaagtattgcgactgaccacttgaccttgaataccaatcaacgacagtcacgtttggacgtgaggctgcgttagcaatgctcttgtttacttcattttgccatcctctagggactcgtgtgttgactagataaattgttgctttatcgaattggtctaatagtgtattcagttgatcttcagtaaaaggaccgtttgtgccgagttctaatattactgagctgttttcgctattaaacttcttataaccagttgcagtatttatagcatcgcgcaattgtcgaccaactagaccatcaattgtcacattaggaactgcttcttttaagtatggctcgatgtcaagcattaccgaatcaccaatagctactgtttgagtaatcgtaggggttggggttgcagctttatctttattatctggttgggtcggatcattttgtcccgcagctttatttgtttcgggttctttctttttctctgtatccgttgttgttttttctttttctttctctttctcttctgcttcttttttggtttctttctcagtatcttttgtggatgttgtggttttaacggatgtttgttgtttttcagcattagtatttacagaaagaacatttgtcatcccaagcgcaaacactgctaaaacagctacaaggccagcaatactaagccatttgccaaccggtttatttttcaagacaaaataatttttatctttgaatcctttgaaataattaatgaagccgtttttgcgaataggtgtttcaatgaaacgaaacgataattcagcgataataaatgttgcggcaacttgcaagatagcgcgccaaatattgggctgcgtgatttctaaaacaggtgtagtcaaagtaataattggatagtgccataaataaataccataggaacgtgtcccaatccatctaagcggtttaaaactaaaaattctgcttaaataagaggctgggtgggagatagttgcaatcatgataacgccaagaatagcaactaacagcaaaccaccgcggtataaaaatggttggtattcactaacaaacgctgtaaataacaggaagaaaagaatactaattgttccagcaatattaagagcagctttacttttcttcggtacaactgggctaagtcggttgaaaggccaaacaaaagcgagtgcacaaccagctagtaaatcaaatgctcttgtatctgttccataataaactcgactcggatcagttcccgggacatataacacagtcattaaaatcgcagaaagaagacctaatcctacaacgatttttaaaagtaatttaggatttttaacccacttgaggaatacaagtaaaaacaaaggccaaaccatataaaattgttcttctattgcaagagaccataagttttttaacggtgatggaagtccaaatgaatcgaaataagatacattatggaaaataaaccaccaattacttacataaaagaatgaagcaatagcgtcaccacgtaagttttttaaaatttcaggatggaaaaacacggaataaatcacaactactacaatcatcacatagacagctggaatcagtcgtcgaaaacgtctgagccaaaattgctttaactgcagtgattgatttttttcccattgtgttaacaaaatattcgtaattaaataaccagataagacgaaaaatatgtcgacgccgatgaatccacctttagcccaactgaagttcagatggtaggcaattacagcgataacagcgagtgctcgaagtccatcaatactcggaacatattttctactgtagcgagtagtccttttcaaattaacatctcctatttgtgataaatatatgtgtgtaaacttagacagagatagtaaagccatctgtttttagctccatactataataccatagataaatcaagaagtaatttaaaaagctgaaattatacatggattttaaaaatttgagtatatttacttatttttgttatagtaattataagtaaatagtttggggggaagcgatttgacagagatttatgctcatagaggaagtagtggcacacatcctgaaaacacattgccggctatgaaaaaagctatagaaacaggtgctgatggaatagaattagacatacatgtactaaaatctggagaattaatcgtaatgcatgacgaacgtgtggatagaactactaatgggactggatttttaaaagattttacattgcttgaggtgaaaaaattatataccgccaaacacttttttagaaaagttcgcgtgcctactttagaagaagtatttaaattagtgaatcacacgggagtaagcctcaatattgaattaaaaacagacgtctttgaatatgaaggaattgagagaaaagttttagaattagcgagtcagtttccgaatgttgagcggatgtattcttcttttaatcctgataccctgattcgccttagagaactagatagtggagcaaggttagcgcttatcacacatggcaatttagacaaggtgcttcccctacatgaaaaaattcagttagacgcggttcatccgccaataaaagcggaaaacaacccaattctccaacaaattccagcgcgtttttggacagtgaataaagaagcggacataactcattttatagatattcatgcaaaaggaattatgactgattttccagaaagagctgtagcaattaaagatagtaaaacaagtcgctgagcaaaacgctttcattctaaaagattacaagctataatcgaagtaagttaataattaaattgtctgagattcggagagactgcaaaaggcgagcgcaatcgccttcatttgcagtctctttttttgtttttttataacttaaagcgtttcagttcattggaatagtggaaaagtagcaagaaggcataaatcagacgtaaacaatttgaagggggcaaacaaaatggtacaattattctcagcttttgatagagaaaccattgaaagaaatttacaagaagaaaaattcgatttagtcattgttggcggcggtattactggagcaggaatcgcattagatgcaacttccagaggtatgagtgtggcgctagtagaaatgggtgacttcgcaagcggaacttcaagtcgctccacgaaattagtccacggtggcttacgttacctacaacaatttgaaattaaagaagtagcagaccttgggaaagaacgcgctatcgtttatgaaaatggtccacacgttacgactccagaatggatgatgttgccattccataaaggcggaaatatgggtaaaacaacagcttcctttggtattcgtttatatgactatttagcaggcgtaaagaaaaatgaacgccgcaagatcttaagcgccaaagaaaccttagcaaaaaacccatttgttaaaaaagatggcttaaaaggctctggttactatgtagaataccggaccgatgatgccagattaacgattgaagtaatgaaaaaagccgttgaacttggcgcaaacgcaattaattatacaaaagcagaacacttcttatatgatgataaaaaacaagtggttggcgtgactgtaacagaccgtctaactggcaaagcttacgatattaaaggacatcgcgtaattaatgcagctggaccatgggtagataaagtcagaaaactcgactatgctacaaataataaacatcttcgcttaacaaaaggtattcatttagttatcgataaacaaaaattcccaatggaacaagcggtttatttcgatacaccagatggtcgaatggtttttgctatccctcgtgataaaaaagtgtatgttggtacaacggatacagtttatgatgaagcagtaattaatccaaaagcactcgaatctgaccataattatgttattaaagcgatcaactatatgttcccagatgtgcatattagcgaaaaagacattgaatcaagctgggctggcgtgcgtccgcttatttacgaagaaggaaaagatccttctgaaatttctcgaaaagatgaagtttggttctctgaaagtggcttaatcacaatggctggtggtaaattaacaggctaccgcaaaatggctgaaaaattactagacggtgtatccaaaacattgtccaaagaaactggtaaaaaatataaaccagttcaaacaaaacatttacctatctcaggtggagacattggcggttcagaacaattagaagcattcctttcgaaaaaagcgaaagaaggaaataatcgtttcggttggacactagaagaaggtcgcgaaattgctaaacgatttggtagtaatattgatcaattgtttacctacgcgcaagaacacaaagaccaaaatgaaactactctaccaaatagtctttatgcagaacttcgctattcgattcaacatgaagccgtaacaacaccgattgatttcttattacgccgtacaggttacttgctgtttgatatgccatatttacttgaatggaaagatgcggttgtagatgaaatggccaaacaattccactggagcgacgatgtaaaacaaacttatatagaagaattaaatatccaaattaatgatgccagagaaccagcagattggcatgatagataaaagaatcataaaaagagcgcatttcttccagatttgcgctttttttatgaaaaaaatcattttcgctattttcaagaaaccattttcatggtacattgattacaggcgaaaaggaggtttttttttgagtaagattcctgttatcgtcatcgttggcccaactgctgtcggtaaaacaagtcttagtattaccttagcgaagaattttgatggagaaatcattagcggcgactctatgcaagtatatcgtggattagatattggtaccgcaaaaatcacaccagaagaaatggatgggataaaacattatctaattgatgtaactgacccagctgttccttttacagcagcaaaattccaagcagaaacaaggggcttaattgaatccatacataatagaggaaaacttccaataatagttggtggaacaggactatatattcagtctgttttttatgattatggttttggaaatgcaagtgaagataaggcttaccgaagagaactagatcaattggacaaaacgactttatggcaaatgttagatcaacttgatccaaaaagcgcagaacttattcatgaaaataataaaaggcgtgtcataagggctctagaagtgatacatttgactggaaaacctttttctgaatatcaagttcatcatacgttaaacgaagcatatcaacctctttttctaggacttgatttagacagggagttactttatgaacgaatcaataggcgcgtagagctaatgtttgaagaaggactagtttcagaagcatcgaagctatatgatgaacatttagtcgatgttccagccatacgaggcatcggttataaagaattatttacttattttgatggaaatagttcgcttgaagaagcaaaagaattaattcaaaaaaactcgcgtcatttcgcgaaaagacagttaacgtggtttagaaatagaatggatattgactggattcaagcgggtgttagcacaactgacactgaagcaatggaaaaagtgaagacctttttagcatctaaataacacttttctgtttggtagtaagaaataaagggtatttgaaattagccaaccaattgcacaatgaaactacattggggtttgggaattttttagtataagatagagattggagagggaaattatgaaacaaggtggacaagggttacaggactattacttaaatcaattgcgtaaggaaaaaattcttgcaacagtatttttaacaaatggctttcagttaagaggacgcgttgtaagttttgacaattttaccgtactactagatgtcgaaggaaaacaacaacttgtatttaaacacgcaatttcaactttctccccgcaaaagaatgtcgctttgaatcctgatgcggaataagcaattcctttaaaagacaagaaactcgttttggcgatgtttcatgtcttttttttataccaaaaatatgctacgattagttttgtctgaaaaagggagatgtacttgtggaacgggagaaaataatacttgtaggcgtcatattgccaaataaaacagaagaagctttttggaactccatgagcgaactccatagccttgctaaaacggcgaatggggaagttatggatgagttgattcaaaaattagaacgcgtgagtcagacgtccttcataggttcaggtaagctgatggaactttcagagttagtggaaatgcatgaagcggatgtcgttatttttaatagtgaacttagtgctacacaagtgcgcaatatttctaaaatagtggatgcccgaattattgaccgcacacaattgattttagatatttttgcgatgcgagctaagtctaaagaaggtaaactacaagtcgcctatgctcagtacaaatatttactacctagacttagtggacaaggtgcctcgctttcgaaattagggggcggaattggttcaagaggtccaggtgagtcgaaactagaaatggataaacgtcatatccgcgaaaaaatgcatgatataaaagcgcaactgacacacgtcgagcgacatcgcaagcgtattattgatagaagaaacacccaatccgtatttcgtttcggtttaatcggttatacgaatgcgggaaaatcaaccattttcaaccgtctaacaaatgagacgacacttgaagaggataaattatttgcaacactcgatccaacaacaagaaaaattcgatttgaaggcgggttccaagcacttttaacagatacagtaggttttattcaagacttgccaacaactttgatcgcagcatttcgttctacgttggaggaaaccgcaaatgttgatgttttaattcatgtagtggatgcctctgacccagattacttacagcatgaaacgactgtaataaacttgctagaagagcttgagatgagtcaccttccaacattaattgtctataataaaatggacaaagcgccgtctacattcgtacctgatcgcccagagcacttacttatttcagcattagatcaagatgctcctaaagaaataaaacaacgaatgattgaactaattgagaaaaactggactttctttacagtagatttatcagaagaaaaaggtaaagagttagcgcaaatgaaacaacaagcatggataacaaagcttgaatatatggaagaaaaagcatgttaccgaatcgagggttatcgacctagaaaggaaactactaatgactgaaattcaaacaataagaaaaaaagtcgaacaacaaattacttcattacaaaacgaaactgatgaaattgccgaatttaaccaagcaaaagtgcttgatgctttccaggaaaataaagtaagtgattttcattttaatccatcgactggttacggttatgatgacgaagggagagatacgttagaacgcgtgtatgcaagcgtatttaaaacagaagcggctctcgttagaccgcaaattatttctggtacgcatgcaatttctaccgttctattcggaatcttgcgcccaggggatgagttattatatataactggtgagccatatgatacgttagaagaaatcgtgggtattagaagcgaaggtcaaggttcgcttaaagactttcaaattggctacgatgcagtaccgttactaccaaatggcgaaatagattatccagcagtatctaaaaaaatatccgctaatacaaaaatgattggtattcagcgttctagaggctatgcagatcgaccttcttttacaatagagaaaataaaagaaatggttacttttgtaaagaacatcaaccccaatatcattgtttttgtagataattgttacggggaatttgtggaacgaatagaaccgaccgaagtaggcgcagatattattgcaggatcgctcataaaaaacccgggtggaggtttggcaaaaactggtggttatattgctggaagaaataccttagtcgatttatgcggctaccggttgacgactcctgggataggaagagaagcgggcgcatcgctttatagcttattagaaatgtatcaaggattcttcttagcaccacatgtaactgctcaagcaattaagggagctcgttttactgctgctatgttagctgaattcggcgtagaagcagatccgctttgggatgccaaaagaactgacttaatccagagtgtatctttccacagcaaagataaaatgattgcttttgctcaagcaatccaagctgcctccccagttaatgcacatgttttgccaatcggcgcatatatgccgggctacgaagatgacgtgataatggcagcaggtacatttattcaaggagctagccttgaacttacagcggacggaccgattagagaaccttatcaactatacgtccaaggaggtttaacatacgaacacgttaaaattgctgtcactagagcaatagaaaattctttataaaaaagtaacatccattttcaaaaaaagtttttatttttttaccacggtagtttctatcgtggtttttttgttgtgaaaatgttgatatatatgggtttgtgagcaatgttagataatcttacataaatttgacaaaacatctgacgtacattataatgctactatcatcaaaaaataattatgttttgagggggaattgtcgtgagtgaaaaggaaatccggagatcgatgccgctatttccaattgggcctgtgatgaagctaaccgatctcaccgctagacaaattcgctactatgaagaccaaggattaatccatccagcacgcaatcaaggaaatcaccgtttgtactcacttcaagacattgatgttttgctagagataaaagattatttgaatgatggtctgaatattgcgggaattaagaaaatgtatcaaatgcagcaaaaagaatcaaaagaacctttgacagatgatgatgtacgcaaaatacttagaaaagaaatgcaacaagccggccgctttgtaaaacaagatgccacaggaaaacaacaattaccaaggttttaaaaagattagaagaggtatttactttatttagaagttaatataaaaagattatttaggaggaatttagattatggcaaaatatacaaaagaagacattttccgctttgcagatgaacaaaatgtaaaatttattcgtttacagttcacggatattctcgggataataaagaatgtggaaattcctgttagccaactaaagaaagcactagataacaagattatgtttgatggttcctccatagaaggttttgtaagaattgaagagtccgacatgtatttattcccggacttagacacatgggtagtattcccttggacagctgaaaaagggaaagtagcaagaatgatttgcgacatttataatcctgatatgacaccatttgcaggagatccacgtgccaacttaaaacgtgtacttaaagaaatggaagagctaggtttcactgaattcaacttaggaccagaaccagaattcttcctattcaaactagatgaaaatcgtcgcccaacacttgaattaaatgatagcggtggttacttcgatttagcaccaactgatttaggcgaaaactgtcgtcgtgacattgtacttgaattagaagaaatgggctttgaaattgaagcttctcaccatgaagtagctccaggtcaacatgaaattgactttaaatatgaagatgcgattactgcgtgtgatagcatccaaacatttaagttagtagttaaaacaattgctcgcaaacacggtttacatgctacatttatgccgaaaccactatttggtgtaaatggttcaggaatgcatttcaatatgtccctatttacagaagaaggtaatgcgttctttgataaagaaggcgaacttgaattaagcaaaacagcttatcatttcttagcgggtatgttaaaacacgctcgtggatttacagctgttactaacccgacaattaattcgttcaagcgtttagttcctggatacgaagcaccatgttacattgcatggtcaggtaaaaaccgtagcccactagtacgtgttcctagttctcgcggattaagtactcgtcttgaattacgtagtgtggatccatccgctaatccatatttagcaatggctgtacttctaaaagctggtttgtccggcattaaagatgagctaactcctccagctccagttgaccgtaacatttacggcatgaacgaagaggaacgtgaagcaacaggaatttatgatttaccagaaagcttaggtcatgctttaatcgagcttgaaaaagatgacatcatccgtgatggcttaggtgaacatattttcgaacatttcattgaagcgaaaacaattgaatgtgatatgttccgtacagcggttcatccgtgggaacgtgaacaatatcttgaaatttattaatattaaaaagctcgtttccgacttgggagcgagctttttttatgcaattgaaaatcaaatgtttgatgttttggtgattgaggcatatatttataaatgtgctagcaaaagggattaatatttgctagggaaaggggcaggtatgcagattactttagctgttttagtttttgccttaacgcttatatttgttatttggcaacctagaaacttgtcgattggatggtccgcttgtattggagcattactcgcattattacttggcgttgtcactttaacagatgttgtaactgtaacaggcatcgtttggaatgcaacactcgcttttattgcaattattattatttcacttattttagatgagattggttttttcgaatgggcagcgttacatatggcaaggttagcaagagggaacggattactcatgtttgtacttatttctattttgggagcactagtggcagctctttttgcgaatgatggggcagctttgattttaactccaattgttttggcgatggtgcgtgcgcttaattttgatgagaaaaaggtgtttccctttatcattgccagtggatttattgctgatacgacgtctttaccacttgttgtaagtaatttagtgaatattgtttcggctgacttttttggcattagtttttcaaagtacgcattaatgatgttgattccgacgcttttttcgttggttgcgagtattattgttctttatatttattttagaaaagcgttacctagaacttatgaaattagtggaattcgtgagccggcttctgcgcttaaagataaaaaaatgtttcggatttcatggggaatacttatcattcttgtgattggatatttcttaagtagctttttggacattccagtgtcatttatcgctttacttgtagcgtttatctttttgctagttggtggaaagagtcatgctgtttctacaaggaaaattttaaaaggggcgccgtggaatattgtgtttttctcggttgggatgtatgtcgtcgtatacggtttgcaaaacgctggcattactaaattattagcagaggctatttcatatattgcgcattatgggcttttcgtaggtacgattgggatgggctttattgccgcgatattgtcgtctgtaatgaataacttaccaactgttatgattaatgcacttgcaatcgatcatactccatttacaggagtgatgaaagaagcgttaatctatgcaaatgttatcggatctgatttagggcctaaaataacgccaatcggttcgcttgcaacgttactatggttacatgtattagctcaaaagggtataaaaataagctggggatcttattttaaaataggtattgtgattactattccagtattgtttattacactcgtcggactttatatttcactccttatttggagctaagaaaaccctgtacaaaattgtacagggtttttcctatgctttataaagaatatgtggctttaaaggatgtccgtccgctaaagcaggatgcataaatgtagctacttttgtaaaatggatttttttcattacttgttctgatggcttatttaacacagcggtgaaactgtaaatttcatcaatagttgttttctgtttggcgaaatcgagagctcctagtgcggcttcggttgcataaccttggttccatacacttttctttaagcgccagccaatttcgatacaaggggtgaacgcagcttcaaaagttgcttcatgaaaaccggtaaaaccaataaattcgccggtagatttttcttcaatggcaaaaagtccgtagccaagtgccgttaattcttgttgatttctttctaaaaaagcattactttcttcttttgaaagtgtagatggaaagtacttcattacgactttgtcaccgttcatttcgctaaagggaacataatcacttgctacataatctcttgcaattagtctatctgtttcaaaataaatcaatataaaaaccgcctaacaaaatatagcttttagtgaatatctctataaaggccaataactttgcctaaaatagtaacgttatttaagataattggttctagtgcatcattttctggttgtaatctaaaatgattcgcttctttatagaaacgtttacaagtcgcctcgttttcgtcggtcatcgctacgacaatttcaccattaattgctgaactttgttgtcgaacaattactttatctccatctaaaatcccggcatttatcatactttctccgtcgatttcaagcatgaagacattggtttctcctgcagccatatattcagggagtgggaaatactcttctatattctcaatcgctgtaataggcattccggcagtaactttaccgatgattgggatattgactacattcggcgtctctgcttcatcttctaaagacaaaatttcaatagcacgaggtttcgtagggtcacgtctaattagtcctttaccttcaagtcgagcaagatggccatggactgtggagctagatgctaaaccaacagcttcaccgatttcacgtacggaaggtggataacccttttcttttacttctgattttataaattcatatatatcttgttgacgtttagatattttcatggtttcacctcattgatttaatggttattttataaatcaagtatagcaaaagaaaatccaatatgcaaacaaaggttcgtttttttattgacatatgcgaacggctgttctataatatagaaaagcgaacgtacattcttttttggagggattattaatgactttaaaattaatttgggataaattttatgtttctattatatttgtaataacttgtttagttctaggaattatattgatgtgcactgttattgggagtggcagtgagtattctgaggtagatgtaaatgaaggggattctatttgggcacttgcagaccaatatgcagcgaagagcgatatggcaaaagcagattttgtatcttgggttgaaaaagaaaataaccttacagatggacatgtgaaagctggggattatgtagttataccagtacacgaaacaaagttacaaagaagtgatagcactattcaattagcaaaccagtagaaacgattttagtatcgtttatgatataataaagaaagtagcgatttagctactttcttattttaatataatgaagaaaaggatgaagtgtgatgctagaaaaagctaaaatagatagaatcaatgaactttctaaaaagaaaaaagcagggactctaactgctgatgaaaaagtagaacaagaaaaattaagaaaagaatatattaagtcgtttcgcactcatatgaagggaacaatcgaaaatactacgattattgaccctaaaggaaatgatgtaacaccgcataaaataaaacaaatgagaaaaaataagaagtaaaaattagtaccaaatgaacatttttgcgcaaatgaacaaaaataccaatcaattaagcaatttaaagcaattattagttgtgttaattgctttttaggcttattattaaaagtagttaaaattatattgaagagaggatgtttcatttgttcgataacacagatagtttagcagtaaatacaattcgtacattatcaattgatgcaattcaaaaagcaaattctggtcatccgggattaccaatgggagcggctccaatggcttatgcactttggtctcgcgtattaaatacaaaccctaaaaattcacattggtttaaccgtgatcgttttgtactttctgctggacacggctcaatgcttttatatagtttattacatttaagtggtttcaaattagaaatagaagaccttaaaaacttccgtcaatgggaaagtaaaactccaggtcacccagaatatcgttatactgatggagtagatgcaactactggtccacttggtcaaggtattgcgatggctgttggtatggctatggcagaaagacatcttgaagcaaaatataacaaagatggtttcccagttgtggatcactatacttatgcgctatgtggagatggagacttaatggaaggtgttgcttctgaagcggcttcttacgcaggtcaccaacaacttggaagacttgttgttttatacgattccaatgatatttctcttgatggcgatttagacaaatctttctctgaaaatgtaaaacaacgctttgaagcttatggttgggaacatttattagttaaagatggcaatgatacagcagaaatcctagctgctattgaaaaagcaaaacaaaatacatcacaacctacaatgattgaagttaaaacagttattggttttggtgctcctaatgcaggtactagtaaagttcatggtgctcctctaggtgacgaaggtattttagaagcgaaaaaagcttatggttggaactacgaagaaaaattctttgttcctgaagaagttacaactcgctttaaagaaactattggagaacgcggtgaaaaagcagaagcagcatggaacgaattatttgcttcttataaagcgaaatacccagagcttgctaaacaattagaagatagcttaaataacaagttaccagctgattgggatgcagatcttccagtatatgacgattctaaagcacttgctagccgtgcttcaagtggtgaagttatcaatgcattagctgcgaaaatacctactatttttggtggttcagcagaccttgctggttctaacaatacaacaattaaaacagatggtgaattcactaaaaaaacaccagcagaaagaaatatctggtttggtgttcgtgaatttgcaatgggtgcagcgttaaacggtatggcactacacggcgggttacaagtatacggaggtacattctttgtattctctgactatgtacgtgctgcgattcgtttatccgcaatccaacatttacctgtaacatatgtaatgacacatgatagtattgctgtaggggaagatggtccaacccatgagccaatcgagcaacttgcaagcttacgtgctatgccaggactttctgttatccgtcctgctgatggaaatgaagtagtagaagcttggaaactagcgattacttcgacagatactccacatgtgcttgttcttactcgtcaaggattaccaactttaccaaattctgcgaaattatctgcagaaggcgttaaaaaaggtgcttatgttatttctcctgctaaaggtgaggttccagaagcaattattcttgcaagtggttctgaagttaatttagctgttgaagcgcaaaaagaacttcaagctcaaggaacagatgtatccgttgtgagcgtgccatcatttgatctatttgcaaaacaatcagcagaatacaaagaaagcgtcttaccaaatgctgttagaaaacgtgtagcagtagagatgggtgctagctttggttgggaacgttatgttggtttagatggtaaagtgattggaattgacaaatttggtgcttctgctccaggtgaaacagttattaaaaattatggctttactgtagaaaacgttgttaatacagtaaaatcactttaattaaacaaacagaccgcgtctagtatatttatctagggcggtcttttttttatgcttttatagattgcgcaggggtgcctttaatggtataattacgaggttgtttgcagcttttattgataaattgatctagatgataagttttcttgaaaagtattgtctgtttaatataaatcaagtacaataaaagaggattttgtttcaaggaggagaaaagagactatgtggatttacattcttgtcggcattatttgtttactagctggtcttgcgggaggattctttattgcaagacgttatatgatgagctatttaaaaaacaatccgccaattaacgaacaaatgttacaaatgatgatggcgcaaatgggtcaaaaaccatcacaaaagaaaatcaatcaaatgatgagcgcgatgaacaaacagcaagaaaaagaaaaaccaaaaaaagcaaagaaataatcttttaacaaagtaaaacccttctattataacttagaagggttttttgattactttttagttgccgaaataattaacatcattggacgacgatattcatcttgcatttctggtaaatttttaagttctggagctggttctggttcaataacacttttaagctcaaaattattttgaaggagtgtctggatgtaagttgtaagggtgcgatggtatttttttacatcttcgccaaggaaatgggttgttcgaatcgattcgttaaaatagcgatcaactggccagtgtaacttattaccagtttcgtcagtataccaatcttgtctgccatccgcggtaaaaactggatgttcgacagagaaaataaactcgccaccggtttttaaattagtatggacttttttacaaatgtcttgaaaggaagcgacataatgaatagcgagtgaactcataataacatcatacatctctggctcattatccatatcttctatcgctttttgtttataattaactgcatttgaagtggtcttttgttttgcttcagttaacatgcgctcagataaatctattccaactactttcttcgcaccatggtcggctgcataaatacagtgccaaccgaatccgcagcctaaatcaagtactgtctttccattaaagtctgggagaagttttttaaattcatgccactctccagctgctgcaagtccgtttttagaacgaggcatttgactatattgttcaaaaaattctttgtcatcgtatttattttctttcaattttaattcctcttttcttcaattaatcagaagctttactgaattctttatctaagaagaggtgagtaaggccgctcacttgttttaagcgtaagatttcatttgcatccattccaatatttttcataatccagctgtctgacatgccgctatctgctaattcaccaacaatagaagacataagctctacgttatgaaaaccgcgagcacgattatgacgaatagtagaagctatccggtttacggtatctttttctaaaataactactggtaataattctttttctctttcgcggatccgtttagaagtctgcatgatagtatatcgatgaaacccgtctattatttcatatttatcagagttttccaagggatagcaaacgattggttgtgtaaatccatcttcccaaatagatttttctagtagttttagttccgtggctggaacggtatttggattataattatttgcttgaagtttggtgtagtgaatgggagtgacgttgtatactgggcttttataattcattatatcacctcataaaatattattatatttctctagtgcatgttttcttttctctaattcaagcttggtttgaccaaaacccatatacttacaggtataatcattttttaaaatagcgatacacattcttttatatgttggaacgctggcgaattctttgattttcaagtcatctggatattctttaaagcgaacaatttccatgggattggaatatgtacgtttattttgaggttttccaaggaagtcagcttgtacatttaagttttttaattcctctacggtttctacttttaaagcgccgcctttttcggtccaataattaatgcttgttttaaatttttttaaataacgttctcttgtataactcggtaatgttgtaagtaaaaattccaaataagatttccatgtgtggtttggaggtaagttaatttctttccatgccatcgctgaagttccaccataaatagccgtgaaattggctccgttcacgcgaccaactaatttagaccaaagggcaggttcaattacgcgatataacttaagactttcggttgcggaatcattgaaagggctagcgacacgcatatcattcaaagttaaaccggcttggtaaaacaaatcgtaaattttattgtaaggccaatcgaatttagcatttgcagtccatatatcttctactaaccaatcatgaatcgggtaggcgttatatatgtttttggaaatttcagtagtccaattatagtttttatacatgcgttcttttttatggatcgcattatagcggttgagcgattcttgttgtcgaataccgattaaggcaatggttttttcagctttatttttagtatgtaaccagtggataagtttcttgttgaattcgtagtcccaaattgtatggaaatcaaaatcaaaaggggcgttgtcttcatttatcacagatggataatcaggcatttctcttacccaaatatcttgttttgatttttcccaaggtatccagtggtcggtatacatcgaaactgcggattgggctgcaataggaaggcaacaccaaagcggctcgataatatctaagttactagttaacatttcagctacaaaatcactcgtcgcagaatattgaccttcatagtccaaatgatatacataaattttcttttgaatattattttttcttatataatcaatcattaaatgaagcatcacagcactatctttaccgccagaaaatgacacaatgatgttatcgaattcggaaaaaataacttccattctttcttgggaagcatcaaagactgttttagaaagcatccataatcacctcaaaagaatttttttgtgagagttcttttttaaattcatgcaataaactcgtttttttagaaatgtttgaatcaattaggttatctagaccaacatttccgcttaaatcatgatagtaacagtcttgtgtttggccggtgcggtaaatccgacgttctgattgatcgcgctgagaataatcaaatgttttatcaaaataaataatttgattataatattgcaaattaagcccgtaagacgatttagcaaaagtggtaatttttacattaggaaacgctttaattaatgcttcttctgatcgcttatatttacaaaaaatgatggttgtagcttcttttcctgcaattaaagattcgacaatagtgaatttttctgaagagaggcaataacaatgttgcatcacttgggacatctctagaaaattaatattaattgtgtaagcagctgctttttgaaggtaatcatcttttatttcataatatttttgcaaaagttcgtcgtctatagtgaaatcgtgacgaatataatgccaattgacttttaattcaagcgaagaagagaatgtaaaaggagcgattaattggtataaatactctaaattatgatatttcttaataatgtccattgactgttgtttgtttttcgatacttgggtaatggttacatattcgcaaaatgtttttttgaactgggaaaaacttaagttcaatattttaggagagagaaattctagttgcgaccataagtctaaaatatttctgcttaatggagttccattcatgattagtcgatagtttgctaatcgagaaagtttaatggctcgttgcgttcggagcgcgtgtttattttttatttttaaactttcatccataataatatagctgttagacgatttctttagtttgtcccggcattttagatataagtgatctgagttggaaagggattcaatgccaataatatcttgtggaaattcgtagccccatttcttaatctcattagcgagattttctttcgtctggaatggcgtgatccacaagacataatcaggacttacttccttaattaattcgcaagctacacgtgttttgcctgcaccgggtttcataaataaagcgccaacattatattgtttaagtttctgtattgcttgtatttggttgtctaataaggtcatttgcaattatcacatctttttcaatttttttaggtatatgtgtacgaactttgacgatactatcgtttattttttttgtttgaaaatgttgcattatttcttcgttttcctgcttaaaaaggagcatcattgttgctgcatctatactctttttttcggtatgcttttttaatgtaaaaatccatgtatctggaaaataaaaataactataatccggagaaacagaaaataccatttttcgcggcaataagaaaaaataacccgcatattcactataagagggtatttctataattgtttgtttttcccattcttcaattctttcgctatatgtataaattttgttccattttaccattaaatctaaaactcccgtgtgttttgtcattttcgttcattttttagctatttatgtgtttattttaacataaatacagctatgatactttacaaaaccattttaattgtgaaaaaatactgttttgggtgtctaacaaatgacaaagtaagtaatttagctaataaaatttggagattttgtgaattttaaaatgttttttcactttttgatagaaaacacttttgtaatagctagctttttagtagaatagataatggtggatggaaaagttttctgtctatgaatagaatatgaaattggaggctattatggataccccagattataaacgagttgtattaaaattaagcggtgaagcacttgcgggaaatgatggctttggaattaacccgagcgtggtcaatttaatttctgctcaaatcaaagaagtagtagaattaggagtagaggtagctatcgtagttggcggcggaaatatctggcgcggtaaacttggtagtgaaatgggaatggaccgtgcagcagcagaccaaatgggtatgcttgcgactattatgaattccttgtctttacaagattctcttgaaaatattggagttgcaacacgtgtacaaacatcaattgatatgcgtcaaattgctgaaccgtacattcgtcgtaaagcaattcgtcatcttgaaaaaggtcgcgtagttatttttgcaggtggaacgggtaacccgtacttctctactgatactgcagcagcacttagagcagctgaaatcgaagcagatgtaattttaatggcgaaaaacaatgtagatggtgtctacaatgccgatccaaaattagatgaaaatgcgaaaaaatatgaagaactttcttatcttgatgttattaaagaaggtttagaagtaatggatacaacagcatcatcactaagtatggacaatgatattccattaatcgtcttctcatttactgaacaaggtaataatatcaagcgagttattttaggtgaaaaaatcgggactactgtcagggggaaaaaataatgagtaaagaagtattatctaaatccaaagaaaaaatggaaaaagcagaacaagctttaactagacaattaggtactattcgtgctggtcgagctaacgcgtcattacttgatcgtttaactgttgattattacggagcagctacaccggtaaaccaaatggcatctatcagcgttccagaagctagaatgttgcttattacaccttatgataaaactattttaggtgaaatcgaaaaagcaattttaaaatcagatttaggtttaacacctaataatgacggctctgtactacgtttatctattccacaattaacagaagaacgtcgtaaagagttagttaaagaagtgaaaaaagaagcagaagaagcgaaagttgctgttcgtaacattcgtcgtgaagcaaatgaagacttgaaaaaactagaaaaaaatggcgacatcactgaagatgatttacgttcttacggtgaagacgttcaaaaattaacagatgaaagcatcaagaacatcgatagcatcacgaaagacaaagaagcggaaatcttagaagtttaattgatacttttcaaatagtaacaaatagggttaaacaccttttaagttgaagtgacattcctaattctttccatatgtgttgggttaggaatgttttttaatgggcaattccatcgctctcatgaaaatctcatctgttcacatggaatttttagtacattaattgattcttttttgttattataggtatagacatgctctaagaagtgtatcaattggaggatttatgatgtttaaaaagctatttcgacaagatggaaatatattaaatagtgaacttgcagaagatttgccaattccacgtcacgtcgcaattataatggacggaaatgggagatgggcaaaaaaacgtttcttaccgagaattgcagggcataaagaaggtatggatgttgttaaacgagttacacgatatgcaaacgcgataggcattgatgttcttacactctatgctttttcaactgaaaactggaaacgacctacagatgaagtggattttttaatgaaactacctgtagaattttttgactcttttgtaccagagttgatagaagaaaatgttcgtgttaatgtgatggggtatcgagaaaatttgcctgaacacacaatgcgtgcagtggaaaaagcaattgcggatacagctcattgtacaggtcttacgctaaattttgcgcttaactacggtggacgttcagaaataatcacagcagcaaaagaagcgatgaaagaacttgtttcagagggcaaaacatctgaggacttaacagaagaattactgaatgatcatttaatgagtcacggtcttggggatcctgatttattaattcgtactagcggggaactgagattaagtaattttatgttatggcaactcgcttatagtgaattttattttacagaaacacattggcctgatttctcaaaagaagattttttacaggcgattattgaatatcaaaatcggtcgcgtcgttttggagggctctagggaggaaaaaagattgaaaacgagaattattactgcagttgttgcgcttatattttttattccatttgtggtttacgggggaattccatttgaattattaagtattttacttgcaactattgcgttatatgaagtgcttgtaatgacgaaacaacgaattttttcgatgaatggaataattacattactattaatgtggttagttgtcgtgccagatagatatttggactttttagataaactgcatattactgaaatggaagttatttttattttaatggcacttttacttgctaatacggtgttttctcgcaataaattccattttgatcaagttggaatttgtatggttgctgctttttatactggatttgggttccattatttagcactaactcgggaagctggattaatgtacgtcctttttgcattatttattgtgtggtcaaccgatacgggggcttattttattgggaaagcaattggcaagcataaattagcaccaaatgttagtcctaataagacggtagaaggttttatcggtgggattgtttgcgcacttgtaattgcaggaggtttttattattttgcagaactaccaggaaatatagcacttgttttggcgcttctagtatttttatctatttttggtcaactgggagatttagtagagtcagccttgaaacgattttacggtgttaaagattctgggaaaatcttacctggacacggcggtattttagacagatttgatagtttgttattcgtattacctctgctacatatacttcaaattatttaattggagatgggataatgaaaaaaattattttactgggcgcaactggttctattggaacgcaaacacttacaattattcgagaaaatccggaaaaatttcaacttgttgcttttagttttggacgtaatattgagcgcggccgggcaattattcaagaatttaaacctaaaatggtagctgtttggcatacgagagaccgtgtgacactggaatctgaatttcctgatgtgaagttttttaatggtttagatggacttagagaagtagcaacatacctagatggggacgttcttttaaatgctgttatggggagtgttgggttattaccgactctagatgctattgaagctggtaaggcaatcgctatagcaaacaaagagacacttgttacagcaggacatttagttatgcaagctgcaaaagaaaagaacatttcactactacctgttgatagtgaacattctgctattttacaagcattaaacggtgaaaatcgggaaagaattgagaaaatcattctaactgcgagtggtggtagtttccgagataaaacgcgggaacaacttagcgaagttacagtaaaagaagctttaaaacatcctaattggaacatgggtaataaattaaccattgattcagctacgatgtttaataaaggcttagaagtaatggaagcgcactggctgtttggtgtggattatgacgatattgaagtagtcattcagcgtgaaagtattgttcattctatggttcaattcgtggacggaagctttattgcgcaactaggcacaccggatatgcggatgcctattcaatatgcgttaacttatcccgatagactttctattccatacgaaaaagaattccggattactgatttttcagcgcttcattttgaagaagtgaattatgaaagatttccggcattgaaactcgcgtataatgctggtaaaataggtggaacaatgccgacagttttgaatgcggcaaatgaaattgctgttgctggctttttaaatgggcaagtcgctttttataatattgaagcgcttgttgaaaatgcaatgaaccgtcatactagtatttctaatcctaacttggatactattttacaagttgatcaagaaacacgagcgtatgtaaagacacttttatagaggtgaagctattttgacaactattattgcttttattttcgttttcggactgattgtatttttccatgagctgggtcacttcttgtttgcaaaacgagctggcattatggtcaaagatttttcgattggcttcggaccgaaaatttttgcttatcggaaaaaagaaacgcagtataccattcgtttactaccaattggtggctatgttcgaatggccggggaagacggggaagaaattgagctaaaacctggttaccgagtagggcttgaattaactccagaagaaactgttagcaaaattatcgttaacggtaaggatcaatatgtcaacgcccaaccgattgaagtttctctatgtgatttagagaaagaactatttatcgaaggctatgaagactatgacgacacgaagaaagtccggtaccaagtagaacgtaatgcacttgttattgatggtaaaatcgaaacgatgattacgccatatgaccgttcttttaatgcaaaatctttaggaaaccgggcgatgactatttttgcgggcccgctgttcaactttattttagcaattttaatttttaccgcacttgcttttgttcaaggtggggtcccgagtaccgataatacacttggtaacataatgccggatggggcagctgcacaagccggtctagaaaaaggagacgaggttctttctattaatggtaaagaaacaaagtcttggacagatattgttcaaagtgtttctgaaaacccgggaaaaacacttgatttcaaaatagatcgcgatggaaaaacacaagatattgatgtgaaaccggcgacgcaaaaagaaaatggtaaagaagttgggaaaattggagtagaaacaccgatggacacttcatttactgctaaaataaccaatggcttcacgcaaacatggaactggattgttcaaatatttacgattctgggtaacatgtttactggtggattttcactggatatgctaaatgggccagttggtatttatacaagtacgcaacaagtagttcaatacggatttatgaccgtgttaaactggactgctgttttaagtattaacttaggaattgttaacttattaccgttaccagcacttgatggtggacgcttgatgttcttcttatacgaactcgttcgcgggaaaccaatcgatcctaaaaaagaaggtattatccattttgctggatttgcacttttgatggttctgatgatacttgtgacatggaacgatatacaacgagcatttttctaaaaagagaaagactaataaagggaaaaaggggtgttttaaatgcgtcaaacgatgacatttataccaacattaaaagaagttccagctgatgcggaagtaaagagtcaccaattacttcttcgcgctggttttattagacaagtagcgagtgggatttacagttatttaccacttgcgacattaacattaagaaaaattgaagcaattgtccgcgaagaattagaagcaattggtgctgcagaaatgcttatgcctgcgcttcaacctgcggaactatggcatgaatctggtcgttgggctgattatggtccagaactaatgcgtttaaaagatcgtgccgctcgtgattttgtgctcggaccaacccatgaagaattgattacgtcccttttacgtgatgaaattaaatcttataaacgtttaccaattacgttatatcaaatccaaacaaaattccgtgatgaaaaacgtccgcgcttcggtctgttacgtggacgggaatttattatgaaagatgcgtattcattccatgcgacaagtgaaagcttagatgaaacatttgagctaatgcaccaagcttattctaatatctttagtcgttgcggccttgaattccgttctgttattgcagattctggttcaattggcggaaatgaatccaaagaatttatggcattatctgatattggcgaagataccattgcttatagcgatgcttctgactatgcagcaaacacagagatggctcctgttttatatatggagaaaaaatcgcatgaacttgagaaagaacttgaaaaagtagcaacagaaaatcaaaaaactattgctgatattgttgaatttttagaagttcctattgagaaaacaatgaaatcaatgctttatcaagtagatgaagaagtgattatggtcttagttcgtggtgaccatgaagtaaatgatattaaaattaaaaatgctttagatgcaacaaatgtcgaattagtagacccaaatgtggcatttgaattactcggtgctaattttggttccctagggccaatcggtgttcctgaaaaaattcgtgtctttgctgataatgcagtaaaaggtattgttaatgctgtagctggagcaaatgaagatggttatcattatgttaatgttaatccaaatcgtgattttgaagttacaagttattttgacttgcgtatgattcaagcaggcgatttgtctcctgatggtcagggcgttatcaagtttgcagagggtattgaagttggtcatattttcaaacttggtactaaatatagtgaagcaatgaatgcgactattttagatgaaaacggtcgtgcacaaccaattattatgggttgctatggtattggtttgtctcgaattttatctgctattgctgaacaatccaatgatgaaaatggtcttgtatgggataagcaaattagcccatttgatttacatttaattcctgttaatatgaagagtgaagagcaagttgcatttgcagaatcactttacgactcgttacaaaaagcaggatttagcgtactaatagacgaccggactgaacgtgctggcgttaagtttgcggatgctgacttaatcggtctaccaattcgtattacggttggtaaaaaagccgcagaaggtatcgttgaagtgaaaattagaaaaacaggcgaaatgattgaagttcgtcaagatgagctactaaatacgctaccaattctttttggagataaataattactgatacaattgtgccagatgaaactccactcgttccatgtgaaaacgggtcatgagggacatctggcttttataaatttggataaaggggtgttattcggaatgactgcaaaagaggaagaaaaacaagaacgatttcagctgttaatgacacaaattggtttacaagatgtaactacttacgaagaattcacgaaagatgctaaaatcgaaaaattagtcgccgataagaaaaataaaacttggcaatttcatttacacgtaccacaaattttcccagctgcactttttcatatgatggatgttggaatgaagcgtgcatttagccaaattgcagaaacagaaatgcaaatagttccggaaaatcagacgattaacgaaacacttattcaagagtattggaacttgattgttgagccaattggaaaacagtcaccaatgatcgggaaacttttaatggagcaaaagcctacgttcaaagagccgcattttattgaagtagcggttcataatgatatggaagaagcgacaattcaacaacgattccaagcgaaaattatcgaaaactacggaaaagccggttttccacgactagcaatgaaaatgcatatgctagatcaatcagaaaccgatgaatataaagcttttgcacaggcgaaacaagaagaagaccagaaaaaagccgcagaagctgtccaagtaatgcaaaaacgtcaagcagaaggacaaaacggcagtgcaaatgcagctccacttaccggtccatttcaaattggctataaaatcaaggatgatgaagaaatcaaacgccttggtgatgtctatgatgaagaacgtcgtattactgttcaagggctcatctttgcaacagaaattcgcgagcttcgtagtggtcgtagtcttttgcaattcaaaattaccgactatactagttcgatgattataaaaatgttttcgcgtgataatgaagacgcagccatgttccaaaatttgaaaaaaggcatgtgggtgaaagtacgaggcagtgttcaaaatgatacctttgtgcgcgatttaattatgatggctcaagacatcaacgaaattgctggagtgaagcgtcttgatactgccgaagaaaaacgtgcagaacttcatctccattcaccgatgagtcaaatggacgcgacttcatcagttgattcactgtttaagcaagcagctgattggggtcataaagcaattgctattaccgaccattccgttgcgcaatctttcccagaagcatacggagcaggtcaaaaatatggcttaaaagtaatttttggtatcgaagcaaatcttattgatgacggagtaccaatcgcatataatgatcaacatatcgctttagaagatgcaacctactgtgtattcgacgttgagactacaggtttatccgctgtttatgacacaattatcgagcttgcaggcgtaaaaatgaaaaacggcgaaattattgataaatttgaagcgtttatcgatccggggcatccactttcagcaactacgattaatctaacaggtattacggatgatatggtaaaaggatctgatccgattgatgttgtattaaaacaattcagggaatggagcggcgacgacatccttgttgcccacaatgcttcttttgatatgggctttattaataccgcttatgaaaaagttgggcttgaaaaagcaaagaatgcagttgttgacacattggagttagctcgtttcctttatccgcactttaaaaatcatcgtttaaatacgttaacaaagaaatttaatattatccttgaacaacatcaccgggctgtattcgatgctgaagcaaccgcatatttagcttggaaactaattaaagatgcaaaagaaatgcacgatattgaatttcatgattccttaaatgactatatgggagaaggcgatgcatacaaacgcgctagacctttccatgcaactatttatgcgcaaacagatgtaggcttgaaaaacctatttaaattaatcactatgtcgaacattaactatttctaccgagtaccacgaatccctcgctctcagttgaaaaaaatgagagaaggcttaatcatcgggacagcatgtagtcaaggtgaattatttgaagcaatgatgcaaaaaggaatgcaagctgctgaaaaggtagccgaattttacgacttcattgaggttcaacctaaacccgtatatgctccgttaattgaacgtgaacttgttcgtgatgaaaaagcgttagaagaaatattaaaaaacattgtccgcgttggtgaaaaaactggaaaacctgtcgttgcgactgggaatgtgcattacaaagatccagttgataaaatttaccgtaagatcttgattcattcacaagggggagctaatcctctcaatcgtgcggaattaccagatgttcatttccgctctacagatgaaatgttaaaagaattcgccttccttggagaagaaaaagcaaaagaaatcgtcgtaacaaattccaatttagttgtcgattggatggatgatttaaaaccgattaaagatgagctttacacgccaaaaattgatggcgcagaagatgaagtgcgtaatatgagttacgggatggcgcaccaattatacggggaaaaattaccggaaattgtagaggctagactggaaaaagaattgaaaagtattattggtcacgggtttgcggttatttaccttatttcacataaactcgttaaaaaatcacttgtagatggttatttagtagggtctcggggatcggttggttcttcttttgtcgctacaatgacagaaattaccgaagtaaacccacttccaccacattatctttgcccgaattgtaaggattctgagttctttgatgatggttcagttggttctggttttgacttacctgataaagattgcccgcactgcggaacgccttaccaaaaagaaggccaagatattccttttgaaactttcttaggatttaaaggggataaagtacccgatattgacttgaacttttcaggtgattatcaaccggtagcccatgcctatacaaaagaaatttttggggaagattatgttttccgtgctggtactatcggtacagttgccgaaaaaactgcatttggatatgttcggaattacgaacgtgatatgaatatgaccatccgcggggctgaggtggatcgccttgttgctggatgtacgggtgttaaacggactactgggcagcatccaggtggtattatcgttattcctgattatatggatgtttatgattttactcctgttcagttcccagcagatgcaacggactcagaatggaaaacaacccattttgatttccactcgattcacgacaatgtgcttaaactcgatatacttgggcacgatgatccgactgctatccggatgttacaggatttaagcggtattgatccgaaaaccattccaacagatgatccagatgtaatgaaattatttggttccacagaatcgcttggtgttaaaccagcagacatcgattcaaaaacagggacgcttggaattcccgaatttggaactcgttttgtacgacaaatgttagaacaaacaaaaccaacgacattttctgagttagtacaaatctctggtctttcccatggtaccgacgtttggcttggaaatgcggaggaattaattaaaaataaaacatgcgaactaccagacgtaattggttgtcgtgatgatattatggtatttctaatttaccaaggattagaaagttcattagcctttaaaattatggaatctgtccgtaaagggaaaggtttaaccgaggaaatggaagaagcaatgatagcaaataaagtgccgctttggtacattgaatcttgtaaaaaaatcaagtacatgttcccgaaagcccatgccgctgcttacgttttaatggcggttcggattgcttatttcaaagtacatcacccattatatttttacgcgacttatttcaccgttcgtgctgacgacttcgatttgacgtctatggtaaacgggaaagaagcggtaaaagctacaatgaaagaagtaaacgataaaggtatggaagcttcaacgaaagagaaaaacttgctaaccgttttagaaattgcgaacgaaatgcttgctcgtggtttccatttccaaaaagtcgatttgtataaatcgtctgctgatgagtttattattgatggagactcacttattccgccattcaatgcgattccaagccttggaaccaacgtagcgaaacaaatagttgccgctcgtgaaaatggggaatttttatccaaagaagacttacaacaacgcggaaaagtatcaaaaacgattattcagtacatggatgaccaaggatgcttggaaggattgcctgatcaaaatcagctgtcattgttctaaaaatgggcaaaacttgcttgtagtcacaatttgtgataaacttatttaagaaatactacgataactcagccaagcgtgggccaatgcccacgctttcgttttgcaaatctgtcaaagagtcacctgtggcagaagtaggggacgaattagctggaaaagcgtatctcttaaggaggctgaaatgagtaaagtactagaacaagtagaagcaattgttgcgccaatcacggatgaacttcaattggagcttgtagacattgcgtttgaaaaagaaggtccaaactggtttttgcgaatttttattgataaagatggtggcgtggacattgatgaatgcgcagctgtaagtgaaaaagttagcgaaaaaatggatgaatctgacccaattacacaaaattactttttggaagtttcatcaccaggggctgaacgtccgctgaagaaagagcaagattttgaaaatgcggtaggtaaatatgtccatgtgacttcttatgaaccaattgatggtcgtaaaatgtgggaagggacgcttgttagttatgacggcacgacacttgtcattactatcacagataaaacacgcaaaatcacttgtgaaattccaaaagacaaagtagccaaagcaagactcgcaattcaattttaaaaagcaaagaataaggagctgaataaaaaatgagcacagaattattagatgctcttcatgtgttagaacatgataaaggtatttcaagagaggttttagtggaagcgattgaagctgctcttacttctgcatataaacgaaatttcaaagatgcacaaaacgtacgcgtagatttaaatatggaaaacggttctatccgtgtattagctagaaaagaagcggtagagcaagtatttgactctcgtcttgagatttcgatggaagaagcgcacaaactgaatccagtatacaaaccaggtgacgtcgtggaacttgaagtaacaccgaaagattttggacgtatcgctgctcaaacagcgaaacaagtcgttactcagcgtgttcgtgaagcggaacgtggcatcatttatgatgagttcatcgaccgtgaagatgatattatgactggtattgttgaacgtcaagattctcgttttatctatgtaaaccttggtaaaatcgaagccattttatctcaaaacgaacaaatgccaaacgaaacttatcatgcacatgaccgcattaaagtgtatttaacaaaagtagaaaagactacaaaaggaccacaaatctttgtatcccgtacacatccgggcttacttaaacgtctttttgaaatggaagtacctgaaatttatgatggcgttgtagaaatcaaatcagttgctcgtgaagctggagatcgttcaaaaatctctgtttacacagcaaatgaagaagtggacccagttggtgcatgtgtaggaccaaaaggcgcacgtgtccaaactatcgtcaatgaacttaaaggcgaaaaaatcgatatcgttgaatggtcagaagatcctttcacattcgtagccaatgctcttagcccttcaaaagtgctagatgttattgtaaacgaagcagaccaagctacaaccgttatcgtaccggattatcagttatcacttgcaattggtaaacgtggtcaaaatgcccgtttagcagcgaaattaactggctggaaaatcgatattaaaagcgaaacagttgcaactgaactaggtatctaccctcgtaatgacgtagaagcacctgttgttgaagaagcagagagcgaaacttttacagaagatgaagagtaaaaaggagaattatcatgcgtaataaaaaaatcccccttcgaaaatgtattattaccggtgaacgcttgccaaaaggcgaacttcttcgtattgcgtattcgaaagacggagcgcttacgatagatcctactggaaaagcccctggacgtggtttttacattgttaaaaatgtagaagcttgtgaaaaagcgaaaaagaaaaacgctatttttcatcaactaaaaatgccggaacaagagtccttttatgatgagctaattgcttatgtgaagactctcgaggaaccaactaatggataaaaaagcactttccttattaggccttgctaaccgagcacgtaaaattaccactggtgaagaattagtactaaaagcagttagaaatgggaaagcgaaactcgttctcatttcagaagatatatccgaaaaaaccgagaaaacaatccgcaacaagtgtgaatactacaatgttgtcgtgaaaaaggccggtacccgggaaatgatagggggtgcaatcggcaaagatacacgtgcaatagttgcaatacttgataaaggatttgctaataagttagcagaattactcggttgaatcttatacggaggtgtacgacatgagtaaagttcgtgtatatgaatatgcaaaagaacatcaagtatcaagtaaaaaagtcattgaagcattaaaagacttaggtattgaagtggcaaaccatatgtccactattaatgaaaatgcgttaagacaattagataatgctattgatggtacaaataaaaaagccgaagcacccaagaaagaaactactagcaacgaaaatggaaatagtaaggggccaaacaaaccaaatatgacaaatagtaatgaaaagtcgaataaaccaaataaaccagcaggacaagctaataaaccagcaactgcaaacaaaagccacggtgcaaaaccagcgacaaataaaccagcaaacacaagtaatcagacacaatcaagcggcaataagcaaccagctggcggacaaaaacgcaacaacaataacaacagtaatcgtccaggcggcggcaatccaaaccgtccaggcggcaacaatcgtccgaatcgtggcggcaattttaacaataagggccgtaacacgaagaaaaaaggtaaattaaaccacagtacagtacctccaacgccgccgaaaccaaaagaacttcctgaaaaaatcgttttcagcgaatctctaacagtagcggaattagctaaaaaattatatagagaaccatctgaactaatcaaaaaactatttatgcttggtgttgttgcaacaattaaccaatcattagataaagatgcaatcgaattaatttgtgatgattacggtgtgcaagtagaagaagaaatcaaagtcgatgtaacagacttagatgtttactttgaaaatgaactaaatgaagctgttgacgagtctaaacttgttgaacgcccaccagttgttacgattatgggtcacgttgaccatggtaaaacaactttactagattcccttcgtaatacaaaagttactttaggagaagctggtggtatcacacaacatattggtgcttatcaactagaaattcacgataaaaaaattactttcctagatactccaggacatgctgcgtttacagcaatgcgtgctcgtggtgcgcaaatcacggatattacgattttagttgtagcagcagatgatggtgttatgccacaaacaattgaagcaatcaaccacgcgaaagctgcgggaatgccgattattgttgctgttaataaaattgataaaccacaagcaaatccagaccgcgtaatgcaagaattaactgagtatgaattagttccagaagcttggggcggcgatactattttcgcaccaatctcagctaaatttggtgaaggtcttgagaacttgttagatatgattttacttgtttctgaagtagaagaattaaaagcaaatccagatcgtcgtgcaattggttctgttattgaagcagaacttgataaaggccgtggtccagttgcgactttactagtacaagatggaacgcttaatatcggggatccaatcgttgtagggaatacttttggtcgtgttcgtgccatggttaatgacttaggccgccgcgtgaaaaaagttggacctagtacaccagttgaaatcactggattaaatgatgtgccacaagctggcgatcgcttcgttgtttttgaagatgaaaaaacagcaagaaacatcggggaaactcgcgcaagtcgcgcacttgtagctcaacgttcagcaacaaaccgcgtaagtttagataacttatttgaacatatgaaagctggcgaaatgaaagaagttaacgttattatcaaagcagacgttcaaggttctgtagaggcccttgctgcgtcacttcgcaaaattgacgtagaaggcgttaacgttaaaattattcatactgccgttggtgcaatcaatgaatcagatattactctagctgcagcttctaatgcaattattatcggatttaacgttcgtccaacaacacaagctcgtgaagcagcggaaaacgaaagtgtagatattcgtttacaccgtgttatttataaagcaattgatgaaattgaagcagcgatgaaaggtatgcttgacccagaattccaagaaaaaattattggtcaagcgcaagttcgtcaaacaatcaatgtttctaaagtgggtacaattgctggctgttacgtaacagatggtaaaataactcgtgatagtggcgttcgtattatccgtgacggaatcgttgtttttgaaggcgaaattgcaacacttaaacgctttaaagatgatgcgaaagaagtagcaaaaggttacgaatgtggtattacagttcaaaacttcaacgatattaaagaagacgatgtaatcgaagcatacgttatggaagaaattgaaagaaaatgattcaatcagttattagtgaatttttcatgcaggaaccacaaaacctcaaagaaaaacgcgctatactgcaacgaattttaacgagaacaaagcaaaaattcaatatctccattgctgaaacagattatcaggatttatggcagcgaactgaaattagctttgctgttgtatccgcctcgcatatccaagctgaaaaagaagctagagaagtacttgctttcctagattcttttccagagtgggagcgagctgagacagtaatggagaagttataaaagaggtgaatacaattgaacgtacgagcaaatcgtgtcagtgaacaaatgaaaaaagaattgggcgatattttaaatcgtaaaatcaaagaccctcgcttaggttttgttactgtaacgggagtagatgttactggggacttacaagaagctaaggtgttcatttccattcttggtaccgataaggaaaaagaaaatacgttactcgcacttgagaaagcgcatggctttatccgctctgaaatcggtcgccgtattcgacttcgtaaagttccagaaatgtcttttgaaatagataattccatcgcttacggaaatcgaatcgatgaattgcttcgtgacttaaataacgatcaataataaataaaagtttaaggcaatccctttatcttctcattcaaacgggatgtaagtggagaattgtcttaaactttttttcttagaaggaggagctagatgaacggcattatcccactgtggaaagaacgcggaatgacaagtcatgattgcgtttttaaattaagaaaaattttacatacaaaaaaagtcggccataccggtactcttgatccagaagtggaaggcgttctcccaatttgtatcggtcgtgcaacaaaattggcggaatatgtgacagatgaaggaaaagtatatgtagctgaaataacattaggtaaatccacaacaacagaagatgccacgggcgaaactgttgcaacgaaggaattagccgaaatttcagcagaagaacttcaagctgcccttacaaagctgaccggaaaaatcacacaaattccaccgatgttttcagccgtaaaggttaacggtaagaagttgtatgaatatgcaagagcaggaatagaggtagaacgaccatccagacaagtggatatttattcattagtccgtttagatggcgtcagtccgctaactgaatcaaatccgacttttaaattagaaatttcatgtggtaaaggaacatatatccgcacattagctgtcatgatcggcgaattgctggggtatccagcccatatgtccaaactagaacggacccgtagcggctttttcaaaaaagaagattgtctaaccctggcagaaattgatgaaaagatgcaagcaaatgatactgattttttatatccgcttgaaaaaggcattgaatcaatggcaaaactagaaatagatgaagaaatacacgcaaaagttttaaacggcgtattattaccaaaatctttattccaaacagttgaaaacgaacctcgtgtcgcacttatttttcaagagaaattaacggcaatttataaaccacacccggagaaacaagatctctttaaaccggaaaaagtcattgagttacaacaagcatagtaattgcgactgcaactttcttatattatgatattagaggaattcgaatttagaggagaagtggcaaaaaatgaagacgatatacttacatcatccaattacaacggatgaatggactgacgtaaaaaaagtaatggcacttgggttctttgatggggttcatttaggtcatcaagcagtcattaaacaagcgaaacagattgctgaagaaaaaggacttcaaacagcagtattgacgttcgatccacacccatctgtcgttttaagcaatattcggaaacaagtgaaatatttaacgccactcgaagataaagcagaaaaaatggctaatcttggcgttgatataatgtatgtagttcgctttactacacagttttcggagttatcaccccgagcgtttgttgataactaccttgttgcattaaatgtaaaacatgttgtagctggtttcgactattcgtatggaaaaaaaggcgaaggaaaaatgacggaattagaaaactacgcaaatggtcgttttgaagtaactattgtggataaacaaacagctgctagtgataaaataagttcaactaacattcgccgagcaattacagaaggcgaactggaagaagcaaaccaattactaggctatccttatacaacaaaaggaaccgttattcatggtgataaacgcggcagaactattggattcccaacagcaaatatacttgttaatgaagattatttgattccaaagcttggtgtctatgcagtgaaattccgtgtgaacggtgaaacgcatcttggtatggcgagcattggttataacattacttttaaagatgaccaagcattgtctattgaggtttatattctggatttccaccgcgaaatttacggcgaagaagcagagattgaatggtatcaatttttccgcccagaacttaaatttaatggggtagaaggtttgattgctcagttagaaaaagacgaggaagatacaagagcttattttgcgaatttagaagattaaacgactatttttgcttgcttttggaggctaaatagtgtatctttaaatctgtacgaacagaaccattacttggcttttgcgactcaccgacgcttggctcagtaatcggggatattttagaaggaggtggaaagaaatggctttaactcaagaacgcaaaaatgaaattattgcagagtaccgtgtccatgatacagatactggttcaccagaagtacaaatcgctgtattaactgctgaaatcaatagcttaaatgaacacgttcgcgtacacaaaaaagatcatcactcttaccgtggattaatgaaaatggtaggtcaccgtcgtaacctattaacttacctacgtaaaaaagatgttcaacgttaccgcgaacttatcaaacgtttaggtttacgtcgataaaaaccagacgaaagcgggataccaaaagttcccgcttttttttgagtattaactatactaaattttggaaaacacgccgaagaaatgaaactttatcgcatgaatccaaaaacgtgcttcaaaaatcgctatttttagcaggtttttggattcatgtgtgctttagaaaatctaaagtgtgcgtgaacattcttatgcatggtaaagtttctggttcgtgtttttcctaatcaaaggagattaaaatatgtctgaaaaacaagtattttcaacagaatgggcaggtaagacattatctgtcgaagtaggtcaattagcaaaacaagcaagtggagcagccttaattcgttacggcgatactgtcgttttaacagctgcagttggttcaaaaaaaccacgtcctggcgactttttcccattaacagttaactatgaagaaaaaatgtattccgtgggtaaagttcccggtggattcttaaaacgtgaaggacgtccaagtgaccgtgcaacattaacagcgcgcctaattgaccgtccaatccgtccattatttgcagaaggtttccgtaatgaagttcaaattacttctactgtattcagtgtggatcaagattgttctccagaaatggcagcaatgcttggatcttctgttgcattagttatttctgatattccatttgaaggcccaatcgctggtgttgatgttggccgtattgacggaaaatacgttattaacccaactattgaacaagcagaaaaaagtgatattagcttaactgttgcaggaacttatgatgcaatcaacatggtagaagctggagcaaaagaagtttcagaagaagcaatgcttgaagcaattatgtttggacatgaagaaattaaacgcctttgtgaattccaacaacaaatcatcgctgcagttggtaaagaaaaacgcgaaatcgaacttttcgtaagcgatcctgaacttgaagcagaagtaaaagcagcaagtgaaggtaaaatgaaagcagctatcaaaacagaagagaaaaaagctcgtgaagctgcaattgaagaagtaaaagaagaaattttagaaagctataaagcaaaagaattagaaaatgaagcagaaattcttggtgaagtagctcatattcttgaaatgattgaaaaagacgaaatgcgtcgtttaatttctcaagataaaatccgtccagatggtcgtaaagtaaacgaaattcgtccactttcttctgaagttggtatgcttccacgtgtccatggttcaggtttattcactcgtggtcaaacacaagctttaagcgtatgtacactagcgccgcttcgtgaacaccaaatcattgacggtttaggaacagaagaatataaacgattcatgcaccattataacttcccgcaatttagtgttggggaaactggtcctcgtcgtgcgccgggtcgtcgtgaaatcggtcatggtgcgttaggtgaacgtgcattacaatatgttattccttccgaagaggaattcccgtacactatccgtctagtatcagaagttcttgaatcaaatggttctagttctcaagcaagtatttgtggatctacacttgctatgcttgatgctggtgttccaattaaagcaccagttgctggtatcgcaatgggtcttgtaaaacttggtgatgactacacaatcctttctgatattcaaggtatggaagatcactttggcgatatggacttcaaagttgctggaacaaaagatggtattacagcacttcaaatggacatcaaaattgatggcttaagtcgtcaaattttagacgaagcattaacacaagcaaaagaaggtcgcttgcatattctagaacacttaacaagtacaattagcgaacctcgtgaagaactttctgcgtatgctccaaaaattattacgcttaatatcaaaccagaaaaaattaaagatgttattggacctggtggaaaacaaatcaatgcaatcattgaagaaacaggcgtaaaaattgatattgaacaagatggtacagtttacattgcttcacaagatcaagcaatgaaccgtaaagcaattgctatcatcgaagacatcgttcgtgaagtagaagttggagaagtttacactggtaaagttcgtcgtatcgaaaaattcggcgcgtttgttgaattattcaaaggtacagatggtttagttcatatttctgaattagcacatgaacgtgttggtaaagtggaagacatcttaaaacttggtgatgaagtaacggttaaagttattgaagtagaccaccaaggccgcgttaacttatcacgtaaagcattgctagagaaaaaagaacaaccagaaggcgacaaaaaacctcaagcagagaaaaaattctaccctaaaacaaaaaagcctgagtctaaataatagcaaaaaagcaagtagtttttaactacttgcttttttgctattatctttttggtcgtgtttttaaatgtgttcgaagtgatttttgaatcgttttccagcgatcccgttcttgtctggctaaagcagggctgttttttcgagcatgataagccatttcacgttgtaatttctgccaattttcataatgttttagcgaaagcgtcccatctgctaatgattcctgaaccgcacagccaggctcacttgtatgagaacaatcgtgaaaacgacaatctttacttaattcttctacgtcagaaaatgtagtttctagaccagcttgatttaaaccaatcccgaattcacgcataccaggcgtatcaataataatccaaccattagcaagcaagtgcatttctctatgagtcgttgtatgctttcctttactatcatcctcgcgaatctccgaagttttcatcagatccgctcctgcaagactattaataaaggaggatttaccaaccccggatgatccgagtaaaacgagggtgctattcggcttcaaatcagcttccagagcttcaaaaccacggtgcgataaattatctacataataagtaggaacgccataagcgaccgtttcgagctccatagtgaagggcgtaaggtcatcaactaaatctgcttttgttaaaatgataattggcgtagcaccactatcccaagcaaccgttaaataacgttctagcctatttaaattaaaatcatggttcaaactcataacaataagcgcataatcaaaatttgcggcaattaattgttcctctgaatccttagtcattcgagaaaaaattgttttcctttgtaatacagataaaatttgtttctcattgcttacttcgacaaaatcgccgacagctggcaaattagaaggggataattcgtaaaaatttcctcgtttaagcgtggctaaaaattccccattttccgttataacacgataaaaatctctaaataccgctgtaactctcccgtatgaagaagtagcagcaattttttgttcttcaaaaaaacttgtaaaaccatatttttcaagtatcaattgtttcgctcctttgtaagtcgggagcattctataggtaaaatacccccgtattatttatgaggtttttcatttttacattttccatatctcatcatcctttctttcttaaataataacaaaaaaaggaaataagttctagactcatttccttttttaataattaatctttatgtgtcaagatttttgcgattttttcataatccatgtcgctcttgagcgtataactaccgtcacgaatgtatttttcataattattatctcttaagtatttatcaaactctgaagaacttttaacgataccatttgcttcaagttcgtcgccagctttggaagagggatctcctctagaaatcgttaatgtatagctttttacttttttagcttcttcagctttctttttagcagcttcttcggcttttttctttgcgtccgcttctgcttgtttatctaattcttgttgagctaataatttttcgtatttgcttttccatgtttttgagttttcatcagaaccagttttttttgatgtgactttagtttcatctgctttggtctgagttgagaaaaactgattataaaccagtaagacaacggcagaaattaagaaacctagcgccaacatccgtaagtttttcttcacagataggctcctcctttaaaatttaaatcaatgttttaaatattcttcaatgattttttctacttcttctttaggtagggatgactgttcagcaatttctgaagttacgattccagaagtataaagggtaatcacttgttttttcatcaattcgcgaactttaggactttcaggaacttgctcaacctcaacggtaggggcatccattttcattgctttttctaattcagagacacgttgttttaattcaaagttttcttgcatccactgagcagcaacatcttccagttctttttctaattgcttattatcacctttttgtaaaaatgaaatgacaaacagcgcaatagcagcaattaataagataattatgactgtggtcatgggttttataaacacctctcttccataaactctactactagttatagcataatttaacataaaacaccatccgaaataaggttttgtaaagaaaataaaaagaaaatgcatagagtccttgcaacaactgtgtaaaaatgatattattatacaggtttagtaaataaattcgtcagtcggagttggagggaaaaataatgcgcgttaatattactttagaatgcactgaatgcggtgatcgtaattatatcactactaaaaataagcgtgaaaatccggaacgtattgaattaaaaaaatattgtccaagattgcgccgtgtaactttacaccgcgaaactaagtaagcagcaggatctccattctgttgctttttttattataaaaaagggggaagtcaaaatggcagacaaacaccttattcgagagaaagttttgcgtaatttaaacactattgataaagtagaacaccgagaacgttctattaaacttgcagaaaaactatttctgttaccagagtggaatcaagcaaaagtaatcgggattacactagcaagacatccagagattgaaacagaaacaataatacttcaagcgaaaaaagaaggaaagaccgttttaattccaaaaactttttatccaagtagaaaaatggaatttaaaaaaatggattctagtcatccgcttactaaaacaaaatttggtattttagagcctcatgagttagcagaaacagtcgataaagatgcaattgacttattaatagttccgggagttgtttttaataaagcacattttagaataggttttggcggcggcttctatgatagatttttagccgattttaaaggagaaacagtctctttgtgtttatatgagcaacaaatagaattcactccagaaagccatgataaacctgtttctattcttattgaaggatagataaaaataattctatagaaaatagagtggattgtttacaacgcccctttttttgcgtatagtagtaaatataatttgtaatgaaagcagggaattttttgagcttccaagaacaatatgtcttctggcgcctaactaactatttcttgggtgttgaaaaataccgtttgatccatcttcatgaggagaaacaagaactttggttagaaaataccagccagaaaaaaagaccagtcatccgtattcagatgaaagaattaagttgggcaaatgtggtggaacgtgatgtgacccacacattacatgtaactgaaaaccttcgtaagcaaatgggacgcttaaaattgcctcttgttaatatatatataactccatttgagcctatgggtgacatttcgcctttttttggacaaaccattgcgtctccaaacgaaaaagtgaaattagaaaatatattacttgcaaacgagcagatgcaggagcaccttgaattacttataaaaaaactagatgtaccagaagaagcatttattcttcctaatgaaataacaaaagaaatggtagcaaaagaacgcgaacaagtaatcacttatattactactaaagtaaatgaagaacaaaaagtagccagaaattctaaaccaattgtcacgtattcatttattggacttatagttgcagcatttctatgggttaccttccaaggtggctcaacagatacttttaacttaattaaatggggcggtaaattcaacccacttatttatgccggggaatggtggcgctttatttcaccaatttttctccatagcggtctaattcatcttgcatccaatgcagtaatgctctatattgttggtgcttgggcagagcgtatttatggtaaatggcgatatattcttatacttcttttaggtggtatttgtggtaacatagcaagctttgcgttaaatatgaatttatccgttggggctagcacggcagtttttgctgtaatgggtgcactgttatatttagttgtattaaaaccaaatctttatgcgaaaacaattggaacaagtattgcttccttagtagcgattaatctactgatagatgtcttctctacgcaaattgatattgctggccacattggtggattagttggcggatttttactcgcgggagcattatcattaccgaaacaatttttccattggcgtagacttgcttatggagtatcccttgttgcagtagctatcctctttttatattttggtttccaaaaaggggaacagccttatgatcctatgccagccaatatagcagttcaacaatatttgcaagaacataacaaagaagaagctacaaaaattatagataatttaattgaaagcggaagtgctgatggctattcttatacttatgcatcatctattgctttacaaaataagcaaatagataaggcagaagatatggcgaacgaagcaattagtctggataatgacatcccagaagcccattattatttatctttttgttatagagtacaaggtaatatagagggcgcccttaaagaagccgatactgctaaacaattatccagtaatccgttttttgattcttattatgatgagttagaaaaaagcaaagaataagaggtttttaatgtgaaaacagtttatgatgttgctcaattattacgaaagcatggcataattgtttatttaggaaagcgacaatacgacatcgaaatgatggaatatgaagtcacagaactttttaagcataatattttagatagagaagtttttgctagagctcgcagtatattgaaacaagaattaatcaaagaacaacgaaaaaatagtagtttaaattaaattgattataaggagaacagcagaatgaacaaaaaattaattggtgtagatttaggcgggacaactgcaaaattagctattttaacaaaagaaggcgacattgaagaaaaatggactatcgatacaaatattgaggataaaggtgctcatattgtaaaagacatcggtgactctattaatcaaaaattaactgacttacagctggataatgacattttttacggtattggaatgggaactccaggaacagtaaattacgaaacaggaacagttaaaggtgcatataaccttggctgggccgaagaacaaaatgttagcgaagacttagaaaaaattactggcttaaaaatagaattagataatgatgcgaatgttgctgcactaggtgaacgctggaaaggtgctggtgaaggtggtgcgaatgttgtatttgtaacacttggaactggcgtcggcggcggaatctttgcagaaggtaaaattctgcacggaattcgtggcgcagcaggtgaaatcggtcacgtaacagttgttccagaaaatggctatgattgtacttgcggtaaaaaaggttgtttagaaactgtagcttccgcaactggtattgtgcgcgtagcaaaagatctagcaaaagaatttactggtgaatcagcacttaaagaagccatcaataaacaagaaactattacttctaaattaatttttgaattaggtgcagaaaatgataaattagcaaatgaaacgattgataaaatctctttctatttggctctagcacttagtcacatcggcaacatgttaaatcctgaaaaaatcattatcggcgggggagtttcagcagcaggagatcaacttttaacacctgtcagaaattattttgagacaatggtatttccagcagttaaagaatccactaaattatccattgcgacaaaagggaatgacgctgggataataggtgctgcttggttggcattaccagttgaagattaataatttttataagctacaataacactccattattgtagcttatcttacttaagatgatctttctatcactcattgttttagcttactatgaaaagggtaaaattctagcatagagagattggaggccagagatgaaaaaatcaaaagcttttttgctaattaccttgttaatgggcttggtttttatctcttttggttgctcagaggaaaaagaaacgccaaaaaagactgcaaaagaagttcagggtgttcaaattaaaacaaaagaattccaacgtgttgttggctggttgtcaaaagatactgttttgttacaaaccaaaaaacatgggacaacctactttgaagaattagatatttataatgaaaaaaagcgtgctatctttaatacaaatgaatctatttcagaagtccaaattagtccagattatcgaaatattttgctttattctgctgagtcagacaaaaaagcaaccatgcgaatcattgccttaaatgatggttcgatagtgtcgtccagagaaactaaaccactaacgacaactttctattggaacgatgaatcgcctgaaaaaataatgtttgtgacttatagtcctcagtggaattttcatattgagaactgggattatacaactaatcaagttgataatgtagatttagtatctccgtttatttcttggtatggtgataatttggttatttcaaataataaagataaaccagatgatgaattaggaaacttatatttacaagatattagagataatgccactaaaagtttaattgttgctaatataatgcaatttgctgtacatgataatgttttgcttacgattgagaaatcttcgaatgaaaaattattgtatgtttttagaacaataggttttcaaaattttttctcttatgattcagcacgagagtatgatgagttaggaacatttatcccgtattttgatataaattttgataaaaatacttttttaacttttgtaccttataagagtcaaaaaataagcagtggaccacatgaatataaattagtaaaagttgatccgacaaacaaaaaagaaacgacagtactagaattaatggataatcaacctattttatcgtatgaaacaggagacttagttctctatggttatttatttgataaagttatagatacgaaaactggcaaaatgtataatttaatcaatacaccaactaaatctttttaaacaacgaactcttgcttatgggttcgttgtttttgttagcgtataaccattttctagggtgatgttgcagttaaagctagataaagtatcgtcagttgattgacattttattattgagctaccgtattctatgttaagttggttggctaacatcgaatcatcttttgctactaacagtgctaaattcaactctgcagatgctaaataatagttttgaagttgtttttcatattgaatttgagtcttaaaaattgaagcgctacctgtcacaattaatattgtaatcaacgctataaaaagtataaacgggagcgtaaatccattatttttcattagaattcattcgctttcgtcagagggaatttggaagtatagaacttattattggaaaaagtaacttttaaaataagctggttttcctcattggtgatttgccaattagttactttgtgtaataaaggctcatgtcctttaccgtttacttgccgtcgtagaatgttattgtattttgaataagtaacgagattatcatttactttgaaagagagtttttctggatgtacttgtatatttgttgctttttctaattctaaccgagtttgtaccaaaaataattgccattcacttgtttgatctaaattactaagctggatagttttatgataacattcgaaaaataatggaataagagagctgatacttaaaacgatggtgatcgatagaattgtttcaagcaaagtgaaggctgatgtgctctttctataatgtacatttttcaattgtattagtttttgcacaaacttggatacctccttgataataaaagctttttatttgctcatcactgaaaataatcggaacacttctataacgcaatagctcgctgtgttcgaaaatttgttgatatagttgactaatttctttctgctgatctagcttttgaaaaatagtcatggaaataggcaacaaaaaactacatacaatagagaaaagcagtaaagaaactatactttctactaatgagaatccattaaccttattcaacacgaaaacgtcctttcccaatttggaatataagcttataatttttatttgttcctgaaagatgaatcgtagaaaaacgattgatagttccgtctagactagaaaaacgataattctcagtttttgtttgttgtaaacttaaagtagttccaaatggaatagtgataagtggttgattgttataagtcgcaatgaattgattttcattaggaataaaagaaatggtagtatcttgttttgatgttatagcatttatttgggcaaggtaaatagcggcttttacttcctctaatagttgtttctctgtaagtgcagtgatagtgtttgcaattggataaatagttagggtaatcatagtgagactaatggatatgacgagtaacatttctagtaaagtgaaggcgttctttttcatttattctcagaaacatttcctgaactgtctattttaatgctttttccattaggacaagatttttgagtggattttaaataaccaccactaactaagtcatttattgacggtatcgaatttttgtctagctggtatgattgaacttgtccttgaaccatcgaaataaaagcctcgcaacctttgttattaatagatttactttgtgtaacgatatttggaatggttagaagtaataatacgctgacaactaaaagaacgatgagcatttctactaaggtaaagcctcgatcatctttccagtctattttgaatttatacattagaactcctcctctaaatttgatttaccatggaaaacattggatataaaattgataaataaatcgatatgattaaaactccgataattataaaaacaattggttggataaatgaaaatagtttttctgttttttgtaaaactttttgatggcataaattgtaatagaataaaaattcttctgctaaattaccatttttttctccatgtatagcaatgtaatatagttctttttcaaaaataggcattttttctaatgcgtttgttaaagataaaccggcttcaagtgaaggaataatatgcttggctatcgaacgaaaaaaagccggggagtcatctcgcgcaaacaattgcataacatgagaaatagaaaggccgctttttaataggtaacctatttctcgtgaaaaatattgcgaataatggattttgacgaactgttttatataagggacacgacaataaaaataagcgcgttcataagctgattttttattttgctttctaataataaaaccaacaaatagaaagagagtgagcaaaatagcacctaatataatcggcattttttcaagcaaaaaataagtgaaattagtgccaagtgaaccattacttgcaagttgcgaaaataaaagttcgaattttggtaaaagaaatattcgaagcaagaaaaatactacaataactgttgaaaataaaactagtggatattgaaatgttttcattaaggcgtttttttcttcagcttttcttttcatatgaatgcctgtttcttggattgtttgaataaaaaaaccatgattagaggcgtaatgaagttgagaacaaataaactctggaaactcgctttgtctaagggcataagaaaaagagttgccaactgcaagggaagcgataatttgcctatatcgctcgctatgtttaggagtggtgatgcttaaataactaatagctgactccaacgaaaagcctttatcaagtaaactagcaattcttattaaaaattcgccatcgtctttccaattaatccggtgaaaaaaagccataagcaacccctttctgataaattgcatctaatgtatatttaggtttgttttgttgataacttgaattaaaataagtttgtatatcttttttagtgattacttcataaatagctgttctttttcgctgtaaatggctacaaagtggatggcactttgaaccacaatagacacaatataaatgggataattgttgaaaactaataccaagtaaacattgagctaattcttctttgctaacgccaaattcaagcaatcttaataaaactccataagtatcaccagcatgaacagtgctaaataccaaatgacctgttagagcagcacgtactacaatttttgctgtttcaaagtcgcgaatttctccaactataagaatatcagggtcatggcgaagaacagaacgaacaacgggggcataagtgatattagctttttcattaatttccacttggagaaaaccaggagaatagtgctcaacaggatcttcaattgtaattacttgaagttcagttttattttctatagaggaaactaaactatacatggaacttgattttccgctaccggtgctccctgaaaaaagaaacaatcctgtttggttattacatagttgtaaaatttgtttagctaccttaggaaatagacaagactttaaaaaagggattgggtatttatagcgaaaaatacgaattaccatactttcgtgaaagtctttattaggcatggtagaaagtcttaaagctattttttcagatttagtttctttctcgtagctaccagattgaggctttcgtttttcgcttatatctagagcagcttgaaatttgagaaatgatattagcttttctccaacatcgaaggagagatagagaagtggcattagtgttccattgacccggagacgaagcaaataacggttccttaaagggtggatatgaatatcgcttgcattaacccgaagtgcttgagatgtaatatgattcattagtttttgtggcataacaacctccttacaagtcatattctacaactgtgtctaaaatcctttgttatacgatttttcacaaaaactaaaaagcgattttcttagttaaaaagagtcagatgatagaaaatgctttattaaaaaatctttttagtgtatctcagcccatagaaaaaacttttttcacatttattatattttcacaatctttgtgcataatgtaacaagcgtataatagatagatgaaatgaagataaagcccttacattccgaacgaagctattaaaataagaattttttaggaataaaactaattatttgccgaacaatacaactcgtgataagctatagaaaaggcagatacataatagaattagcgggtgaatgtaaacagagagactgtgaaaagcagcgccgacggggaaagcataagttatgtgaaactctcaggcaaaaggatgtttacgggacgcaactctggagtcatttttatgtcacgacagggcttatgaactatataagcctttttgttatgtgaaaaaggaggatataataatgacggaattacttaaaacaccgattcatccactatatgcaaaatatggtgcgaaaaccattgattttggcggatgggatttaccagtacaatttgctggaataaaagcagaacatgaggccgtgcgaactgatgcagggttatttgacgtgtcccatatgggcgaaattttggtggaaggtcctgacagtacttcttatttacagtatttgttatctaacgacatagagaaaataaaaatagggaaagcacaatataatattatgtgctatgaaacgggcggaacagtagatgatttagttgtttataagaaatcagaaaccgaatacatacttgtcgtcaatgcggcaaatacagaaaaagattatgagtggatggttcaaaatattgttggggatgttacagttaaaaatgcctcttcagagtttggacagttagctttacagggaccaaatgcagaaaaaatcctttctaaattaacagatgcggacttaagctctataagcttctttggttttatagaagatgctgatgttgctggagtgaaaacaattatatcgagaagtggatacactggagaagatggttttgaaatatacatgcaaagtgcggatgctggaaaagtattcgaggcaatcttggctgaaggtgtagcgccaatcggtcttggagctcgtgatacgctacgtctagaagcagttcttgcactttacggtcaagaattgagtaaagatattactccacttgaagccggtcttaattttgcagtgaaattaaaaaaagaagcagattttatcggaaaacaagcacttatcaagcaaaaagaagcgggactaacgagaaaattagttgggattgaattgattgagcgaggcataccgcgtcacgactatccagtatttctaaatgataaagaaattggagttatcacttctggcacccaatctccaactcttggcaccaatatcggtttagcgttaatagatactgcttatactgaattagaccaagaactagaagtcggaattcgaaataagaaagtaaaagcaaaagtagtacaaacaccattttataaacgcgcaaagtaaaaaggaggaaataatatggcaaaacatcgttatttaccaatgacggaacaagatgagaaggaaatgcttgaagtgataggggttaagtcgattgatgacttatttcaagatattccagaaaaaattagatttaagcgggattatgatttaaaaccggcaaaatcagaaccggcgttgttacgagaattatctaaacttgcctctaaaaatgccaatacttcagaatatgcatcctttttaggagctggtgtatatagtcactatattccaactgtggtagatcacgttatttctcgttcagaattctatacagcttatacgccttatcagccagagatttcgcaaggggagctacaggcgatttttgaattccaaacgatgattgcagaattaactggaatggatttagcgaattcctccatgtatgatggtggaacagctcttgccgaagcagcgatgttagcaagcggacatactaaacgcaaaaaaatccttatttcaggggcggttcatccagaaagcattaatgtcctaaaaacctacgctacaggtcaacatattgaagttgaagttattcctgaagtggatggtaaaacggatatagatgttctaaaaaaagctctttccgatgatattgcagggtttgttgtacaatatccgaacttttatggccaagtagaacctttagcagaattagaaaaattggttcatgaaaataattctttacttcttgtttcaagtaacccgctatctcttggcttactgacgccaccaggagaatttggtgcggatattgttgttggtgactcccaagtgtttggtattccagaatcatttggtggaccgcactgtggtttctttgcggtaacaaataaattaatgcgtaaagttcctggacgtttagtcggggaaacggtagatgaaaatgggaaacgtggttacgtcctaacattgcaagcacgcgaacaacatattcgccgcgataaagctacttccaatatttgttcaaaccaagcattaaatgcattagcttcttcagttgctatggcgacacttggaaaaactgggctagtagagatggcgaaacaaaatcttgataaatctcattatgctaaacaaaaattccgcgaaaatggctttgaagtattattttctgatggttttttcaatgaatttgtagttaagctttctaaaccaattaaagaagtaaatgaatcgcttctagatgaaggaattattggcggttatgacctcggtttctatgatgctaaatacgaacaacatatgcttgtagctgtcacagagatgcgtacaaaagaagaaattgatgcctttgtggcaagcttggagggtgtaaaatgaatttagaagaaacaatgccattagtctttgaacgctctattccaggaagaattggttttagtttgccggaaagtgatgttcccgaaacaaatgcaggtgactattttgatgaagcatatcttcgttccacaccagcagatttacctgaactcagtgaactggaaattatgcgtcattataccaatttgtccaaccataattttggtgtagactctggtttttatccgcttgggtcttgtacgatgaaatataatccgaaaattaatgaaaaagtagctagattccccggtttcgccaatattcatcctaaccaaccagaaagttctgtccaaggtgcgttagagctgctttatgatttacaaacaagtttagttgaaattactggaatggatgaagtaacgttacaaccagctgctggggcgcacggtgagtggactggcttaatgttaattcgtgctttccatgaaaaaaatggtgatacaaaacgtacgaaagtaatcattccggactctgcgcacggtactaatccggcttctgcggcagttgctggctttgatgtcgttacagttaaatccaatgaaaaaggacttgtcgatgttgctgatttgaaaaaagtagtaggtgaggatacagctgcactaatgcttacaaatccaaatacattaggtctttttgaaaaagatattgttgaaatggcagaaattgtccatgcagctggaggaaaattatactacgatggtgccaacttaaatgcaatcatggcaaaagttagaccaggagatatgggctttgacgtagtacatttaaacttgcataaaacattcactggtcctcacggcggcggtggacctggttcggggccaattggtgttaaaaaagagttaattccattcttaccaacgccagtccttacgaaaaaggacgatgcttatacatttgattataattatcctgattcaattgggcgagtgaagccgtattatggtaactttggcattaatgtgcgtgcttatacttatattcgcactatggggcctgatggtttgaaattagtgacagagtacgctgttttaaatgccaattatatgatgcgcaaattacaagacgcttatgatttaccatttgaccaagtttgcaaacatgaatttgttttaagtggtaatagacagaagaaacttggcgtccgtacagttgatattgcaaaacgcttactagatcataatttccacccaccaactgtctacttcccattaattgttggtgaagcaattatgattgaaccgactgaaacagaatcgaaggaaacactggattcctttattgatacaatgctgaaaattgctaaagaagcggaagaaaatcctgaaatcgttcaagaagcgccgcatagcacatatgtgaaacgactggacgaaacaagagctgccagaaaaccagtgttacgttatcaaaaagaagtataaaaaagaagccttgccatggatctcacggcaaggctttttcttatttagattttgttttacctgtccatttacgatagccgcctttaagctgataaacatctttataaccacgtttatacagcataatagctgcgcggttactgcgttgtgctgtttggcagtataagtaaactggtaaatcttgacgaatctctgttgtccgatttttcatttgtgtaactgggatatttctagctccgagaatatgtccagcatcgaattcatttggctcgcgaacatcaattaactgtgctttacgataaccttttttaaactcttcttctgttaaaacttttagtgctttacgtcgcattacaaactggtaaatttcgtatcctaaaagaataaccagaatgataattgctataatccaactaatcaattgtgtaaacccctttcatcctgaaaactgctttttttaaagcatccttttctattataacttattttttgccaccatcaatcactttaaaagaagattttcgttttttcttcgtttttttctttgggtcatgtaaattctttgattgtttcactgctttttgatagtttgtatctgtttttctattagtaaaaagtcttagaagtagggtgaaaataagtgttccaattaaaaccgaaattagtaatatgaaaaatgatttaaaaccacccattaaaagtccgataccaaccagcgcgagtaaaacaataacaataagaggatatttcttcactatgaatcaactcctattctaaaagttccagattctcaggttcagccgcatcaactggagcgccttctttttcaacacgtaaaagttcgttgaatgacgcaatggcaacttctacttgatcatcggacggctctttagttgtaagaagttggagccacagtccaggaacacctaaatatttaagcactgggatatttcggcatttattagttaattgtaaaacttcaaatgctacacctagtacaactggaataagtaaaatccggtcgacaacccgaagccaaagtgggtcagttggaactagcaaataaataaacatacctacaataactgtaaataaaataaaactactaccacagcggtaatgaagtcgtgactgcttttgaacattttccactgttaaaggtaaattttcttcgtaacagttaattactttatgttcagatccatgatattgaaaaactcgtttaataattggagtctgagaaactgcaaaaatataagttaatagcagaatcaatttgaaaaaactctctaaaaacacttgtgctgtgtcgcctggaacgatagggcgaaataactctgctaaaaagaccggaattaacgtcatcacaaatttagcaaaaacgaaagataagataccgattaccgcaacacctaaccacatcgcaattttcgattctttcttctcgattttttcttcttcaacagggttatttggatcctcatcatatcggtctgtcgcaaaagcgaggtgtttggaaccgatagcactagattcaattaaagcaacaatacctcttaaaaaaggaattttcttcatacgcatgacccaaactgggctatgtttttctaaataaaaatattctaatgaaccatctatacgtctaacagctgtaactgtttgttttctgccgccaaacatgacgccttctacaacagcctgtccaccatatgatggcacgttttgtttgctcaaacttttcaccagcctattcatgtttactaatatgttattttacgctaaaaactgtttttcgtatagcgcaaaacgcctaaaaaaagttattttttctaaattgtgataaaatagtttcgaacgcgtttaataatgcgatttttgcagacttaaaatttaataaaagtgggggaataaaaatgtctaaattaactaaaattcaagaaacacttggcaaggaaaagatagaagcagttcttgttacaagtgaatttaatagaaggtatgtctcaggtttcactggaactagcggtgtagcactcattttacctgaaaaagcatattttgtaacagattttagatatacagaacaagcggctaaacaagctgagggatacgagattgttaaacatgaaggaccgatttttgatacagtagaagatttactaattaaaaatgatacaaaaacactgcatttcgaagcggattatgtaacggtatcagaatttaaacaaatggaacgcttgtttaatcgtcaattaattcctcttactggattttttgaagaaatgcgtaaagtaaaaacagcgagcgaattgaaagctattcggacggcttgtgacattgcagacgctgcatttgcgcatattattaagttcattaaaccaggaatggcagaaattgaagtatccaatgaactagaattctttatgagacgtgctggagctacatcatcttcgtttgatacaattgttgcttcgggtgttcgctctgcacttccgcatggtgttgcttctgataaaaaaattgaggttggcgactttgtaacgatggattacggttgttactatgacggttactgctctgatatgacaagaacaattgctgtcggtgaacctgctgaaaaattaaaagaaatttatcaaattactttagatgcgcaattaaaagtaattgatagcttaaaaccaggtatgactggaattgaagcagatgccattgcacgtgattatattgcttcctttggttatggcgatgcatttggacattcattaggtcacgggattggattagaaattcacgaaggacctaatttatcattcaaaagccctcaaaaattagaagttggtcacgttgttacagatgaaccaggaatttatttgccaggaattggcggggttagaattgaagatgatcttttaattacagaaactggtaatgagattttaattcattcaccaaaagaattaattattttataaaattcctttgtaactttgtgtgttttatggttaaataaggaagaatgagcagttttaatatgctccaaataaagatactttgcaaattacaggaggaaaaacatgatttcagtaaatgactttaaaacagggttaacaatagaagtagataatggtatttggcgtgtgctagatttccaacatgtaaaacccggaaaaggagcagcatttgttcgttccaaattacgtaatcttcgtacaggtgcaatccaagaaaaaacattccgtggtggcgaaaaagttgcaaaagcgcaaattgataatcgtaaaatggcttacttatacgctgatggtacaaatcatgtattcatggataatgagtcttatgaacaaattgagcttccagaagaccaaattgctcatgagcttaaattcttaaaagaaaatatggaaattaatattatcatgtatcaaggcgaaacaatcggtattgatttacctaacacagtagaattagttgttactgcaactgatcctggaattaaaggtgatacttcttcaggtggttctaaaccagccactcttgaaactggccttgttgtccaagtgccatttttcgttaatgaaggagacaaactagtaattaatacaaccgaagcggcatatgtttctcgggcgtaagaaagaagagttcattacagctggagttaattcttcagctgttttttctatttgctagcgcttcctgtacaccttttgaataaaaagtatggtacaataaggacaatgcgtgattcatgcaattttttatttttagtattattaaggagtgtaaatggaatgttatcaatagatgaaattaaacagctaattgagctgattgacgagtcaactctagatgaatttgagttagaaacaaaggatagtaagattttgcttaagaagaataaaacagtggtttctgcgcctcaagtagaagtacctgttgctgttacaccagcgccagttcaagcacaagcaactgaacaagctgcggcacctcaagcagaaacaactacgactgatgcaggcttagaagttatcacctctcctatggttggtactttttatgcatctgcttcaccagaagatgcgaatttcgttagtgttggttctaaagtatccgcacaatctgtcgtatgtattgtagaagcaatgaaattattcaatgaaatcactgctgacattgacggagaaattgcagaaattcttgtttcaagtggcgaattagtcgaatttggacaaccactattcaaagttagaaaaaaataaggggtcgaaaaacatgattaaaaaagtactggtagcgaaccgtggagaaatcgctgtccgtatcattcgcgctgcaaaagaacttggagtggagacagtggcgatttattcggaagcagataaagaagcgctacatattcagctagcggatgaagcttattgtgtaggtcccgcggcaacaaaagatagttatttaaatatgtctaatattattagtcttgctgttttaacaaactgtgatgcgattcatcctggttacggattcttggctgaaaatgctgacttcgctgagttgtgcgaagactgtaacatcacttttattgggccaagtgcctctgcaatttcacaaatggggacaaaagatgtggctcgcgaaacaatgcgaaaagctggcgtaccaatcgtacctggttcacaaggaattgtcgctgatgtagaagatggcaaaaaaatcgctaaaaaaatcggttatcctgtaatcatcaaagcaactgctggtggtggaggtaaaggtattcgtgtagcagaaaatgaagaaaaattaatttctggtattcaaactacacagcaagaagccgaagcagctttcggagatcctggcgtttatttagaaaaatacattcaagatttccgccacgtagaaattcaagtgcttgccgataatcatggtaatgttattcatttaggagaacgtgattgtagtattcaacgtcgcttacaaaagctaattgaagaatcaccttcaccagctattgatgaaaagacacgccaaaaaatgggtaaagctgctgtcaaagctgcaaaagccgtgaattattcgggtgcaggaacgatcgaatttatttttgatcatcacgaaaataatttttactttatggaaatgaatactcgtatccaagtagaacatcctgtaacagagcttgttactggtattgatttagtaaaacaacaatttttagtggcttcaggtgaagaactgaaaatcaaacaagccgatgttaaattaaccggttgggcgatggaatgtcggattaatgctgaaaatcctgagaaaaactttatgccagcaccaggagaaattaaattttatcttccaccaggtggcttaggcgttcgaattgactcagcagcatatccaaactacaaaatcccgccattttatgattcaatgattgcaaaagtaatctgttatgcagaaacacgtgaagaagttgttcaaaaaatgaaacgggcactttcggagtttgctattgatggcattccttccacaataccattccatttacgtgtgttagataacgatgtattcctgtcaggagactttaatacaaaattcttggagcaaaatgatgtaatgaatctttctaaggagggctaaaaatggcttacacaaaagatttaagaaaacaaaatgatgcaccacttggtaaaattgaaattgcgcctgaggttatcggtgtaattgctggtcttgctgcgagcgaaatcgaaaacgttgcgtatatgcaaggtggttttgctacagaaatgcgcgaaaaattcagcggtgccgttaactaccgtaaaggtgtaaaggtagagctaactgaagaaggtattctaatcgaactttattgttctgtactattcggtgcaactatcccgcttgttgctcaaaatattcaagatgctgtccgagatactattttcaatatgacagggttgaatgttcttgaaatcaacgtgcatatcgttggcgtacaatttgaaaaaacagaaacactttccttcgatgattttgagctttaaaattcaaggaaaaaaaggagcagccttaacatgaaaagaagagaagcgcgcgagaaagcacttcaagcattattccaaatcgaattaaacgaaatgtcgttagatcaagccattaaaaacatcatggaagacgaacaagacgattatatggagcaattagttgaaggagttatggcaaataaagctgaaatcgatgcgattattgagcctaacttggataattggcgcatcgatcgtttgaacaaagtagatctttctttgctacgactaagcgtttacgaaattaagtacttggatgacgtaccaaatcgagttagtttaaatgagtccatagaaattgcgaaaatttacagtgatgaaaaatcaagtaaatttattaatggcgtacttgctaatattgcacctgaagataaataaacttgattgagtgcaaggttttccttgcactcccttatttcgcgatttttaagcataatagcgtggaaagtattttaagggggccaaactcatgggagaaattattgatggcaaaaagttagccaaagaaatccaagagaaagtaacatcagaagtagctgaattagtaaaacaaggtaaaaaaccgggtcttgcggttgtgctcgtaggagataaccaagcctctcgtacatatgttagaaataaacaaaagcgaacagaagaagcaggaatgaaatctgttttaattgaacttcctgaaacagtaacagaagaaaaattactaaaagtagtagaagagttaaatgaagataatacaattcatggtatattggtacaattacctttaccaaaacatatttcagaagaaaaagtcattgatgctattagttttgacaaagatgttgacggtttccacccggtgaatgtaggtaacttattcattggtaaagattctttcgttccgtgcacacccgcaggaattattgagttaattaaatcaaccggcactcaaatagaaggcaaacgagcagtcgttattggcagaagtaatattgtaggtaagccagtagcacaattattattaaatgaaaatgctacagtaacaatagctcatagccgtacaaaagatttacctcaagtggcaaaagaagccgatattctagttgttgcaacaggattagctaaatttgttaaaaaagaatacattaagccaggcgcaattgttattgatgttggtatggaccgcgatgaaaacaataaattatgtggcgatgtagattttgatgatgtcaaagagcaagcaggattcatcactccagttccaggaggcgttgggccaatgacaattaccatgcttcttgctaatacattaaaagctgcaaaacgcatttggaagatgaattgattaattggatgtgaaatgatggaacaagataaatatttaacggtagccgcaataaccaaatatattgaaaagaaatttgaagttgatccgtatatgaaacaagtattcgtgcgcggagaaatttctaatttaaaacaaccagcgagtggacatctgtattttacggtgaaagatgaatttgctatgcttcgttctgtcatgtttcaaaaagcagttcaaaagattggttttgttccagaagatggtatgaatgtacttatcacggggcgaattggcgttttcacaaaagctgggcgttatcagttttatgctgaacatatggaaccagatggcgtcggtgcactgtatattcaattagaacagctgaaatcacaattagaaaaggaaggactttttgcggaagcgcataaaaaagtgcttccttctttcccgtccaaagttgcagtagttacatctaaaacaggtgctgctgtaagggatattttaacaacgattcatcgtagaatgccctcggtggaagtaatcgtgtatcctacagttgttcaaggtgataaggcagctcagcgaatagtagaaaacattggtcgaatcaatcagcgaaatgatattgatgtgatgattatcggtcgtggtggtggctctctcgaagaactatgggcttttaatgaagagccagttgttcgagcagtttatgattctgatgtacctgtaatctctgcggtaggacatgaaacagactttgcgctcagtgatttttcagcagacgttcgagcagcgacaccaaccgcagcagctgaactagcggttccagattatcgcgatttagaagaacgacttgcagaacgtaaatatcgcttattagcagttacaaggcagttgttagaacgtaaagaaagagcacttgagcaactaaaacaacatttaatcttaaatgggccaaaacatcaattagaacagcaaatggaacgtacagattattttgctgaacgactaaaaaatgctttttccaagcaagtattgctaaaacaaactacttttaaccgactaaatgatcgtttacactattaccatcctaagaaagaaatagccttacaaaaagagcaaataatattacgtaagcaagcgttagataaagcaatgaaacaacaacttaaagataaacaacaagcttttattagacaagtcgaggctttagaacatttaagcccgctcgctttattgaaacgtggatttggtgtaacgtataaagcaggagagttagttaaaaccgtccaagaattggaaattggtgataatattcaagtaaaaatgcaaggtggacacatagacgcacatattaccgcaaaggaggaagatacaagtggcaactaaaaagaaaacttttgaagaagcaatcgcagaactagaaacaatcgtagaagcgctcgaaaacggtagtgcctcacttgaagattctcttgatatgtatcaaaaaggaatcgaattaacaaaattatgccaagataaattgcaatcagccgagcaaagaatggctaaagtagtcacagaagcaggagaagaaattccttttgaagcggatggtgaataaatttgcaagatttgatgctttttctagatcattataaaaaagtacttgatgagtcgctttttaaagaaataaatatgcgcaatatcgaacctaagttgaaagaatcaatgttatattcagtgcaagctggcggaaaacgaattcgtccaatgcttgtttttgcaacgcttcaagccttaaatattgagccaatgcgcggtttaaaaacagctacggcacttgaaatgattcatacgtacagcttaattcacgatgatttaccagcaatggatgatgatgactatcgacgcgggaaatggacgaaccataaaatatacggtgatgcaacagcaattttagcaggagatgctttgttaacactcgctttttctattttagctgaagatgaaaatctatctttcgaaacgcgtattgctttaattaatcaaattagttatagcagtggagcagaaggcatggtaggtgggcaacaagccgatatggaagctgaaaataaacaagtcacattagaagaactagcatcaatccacgctcgcaaaactggtgaactattaattttcgcagtaacctcagccgcaaaaatcgctgaagcaactccagaacaaacaaaacgattacgaatttttgcagaaaatatcggcattggttttcaaattagcgacgatattttagatgtaattggcgatgaaacaaaaatgggtaaaaagacaggggtcgacgcttttctgaataaaagtacctatcccggattactcacactcgaaggtgctaaacgggcattaaatgagcatgtttcaattgcaaagtcagcgctttcaggacatgatttcgacgatgaaattctccttaaacttgctgatttaatcgcacttagagaaaattaatcataattatctagtaatttcaaaaatttttcacatatataattcaaattgatttgcttttcttaaaataccgtgttatactaatgtaagattatttttgtgggtgaaagatacgattgtgaacaactttccatctcgtgccgttaagcaagaatagtaaataattagtgtgcataacacacgaggaggaacatgaacatggaacaaggtacagtaaaatggtttaacgcagaaaaaggatttggttttatcgaacgcgaaaacggtgacgatgtattcgtacatttcagcgctatccaaggcgacggattcaaatctttagacgaaggtcaagcagtaactttcgacgttgaagaaggccaacgcggacctcaagcagctaacgttcaaaaagcgtaattctattttttgaataagaaaaagcaaatcatttcggtgatttgcttttttatttgcctaaaatcacctttccttgtttggtataactagaattatttgctataataagaacaattaatcgagaaaaagactttgcatgtattcatgcgaggactctttggaaagtgagttgtttttatttggatcttttaaaaataaaggatccttcctttatgaaacaattggatatacaagaattagaagcacttgcggcggatattcgcgcttttttaattacttctacttccaaatcaggagggcatattgggcctaatcttggtgtggtagaactaacgattgcgctgcattacacttttaatagtccaaatgataaatttatttgggatgtgggccaccagtcttatgtgcacaaaatcctaactggaagggcgagtcaatttgatacattacgtcagcacggcggactagacggatttccaaaacgaaaagaatctattcatgatgtatttgaaactggccacagctcgacttccttgtctgctgcagtcggtatggttattgctagagatataaaaaaagaagacttttatgttattccgataatcggtgacggggcgctcactggtgggatggcatttgaagccttgaatcatataggagacatgggaaaagatatgattgttattttaaatgataatgatatgtccattgcgcctaatgtaggagcactccacaatgtccttggaaaattaagaacttcgaatacatttcaacaaacaaaaacaaatatagataaattaatgcgaaaaattccaactgccggtgaaaagttagctgacactgctgaaaaagcaaaagacggcataaaacatttgcttgtagagggtactttttttgaagaattaggttttatgtatctaggaccgattgatgggcataatttagaagatgttattaccaacttagaaatagctaagcggactaaaggacctgtactcctccatatcatcacgaaaaaaggaaaagggtaccaacctgccgaattagactcccgtggcacctggcatggtacagggccatataaagtcgaaacagggagcttcattaagcctgctaagactgtcgcctcatggagttctgttattagtaatgaattaatgcgtctagcagcgaatgatgaacgtatcgttgccataactcctgccatgcctgtaggttccaaattagaaaaatttgctaaaacttttccagaacgtttttttgatgttggaattgcagagcaacatgcaacaacaatggcggctggtttagcaacgcaagcaatgaagccttttctagctatttattcgacatttctacaaagagcttatgaccagttggttcacgatgtttgtcggcaaaaattaaatgtcgttatcgggattgatcgtgctggccttgttggagcagacggtgaaacacatcaaggtatttttgatatttcttttctaaatagtattccaaatatgattatcacgatgccgaaagatgaagaagaagctagacaattaatggacactgcttttgcttatgatgatgggccttttgcaattcgttacccacgtggaaatggaccgggtaaagagctttctgaatctagtaagcttataccaattggcgaatgggaaacgattattcagcctgttgatgctgttattttaacttttggaccaacgctcgaacaggcacttaaagcagctgaacaattagaggatctaggtcagcgtgtgggtgtcattaatgcacgttttattaaaccgctagatgaagctttattacaccgaatttttaagcaaaaaatccctattttaacagtagaagaatcattattaaaaggcggatttggcgcaagtgtgttagaatttatggaagaaaataattatacggatgttactatccatcgtattgggttgccagatgaattcattggtcacggttctgtcccgctaattcttgaatcctatggtatatctccaactggtattgtattaaaaataaatgaaatgctcgcacaaagcgagtaagttaagggcgaagaaactatgacaataaaaaaagaacgcgcagatattctgctagtagaacaaggactatttgaaacaagagaaaaagcaaagcgtgccattatggctggaattgtttaccgtaaagaagaacgtgtcgacaaacctggagaaaaaattccggcagatagcgaactgcaagtcaaaggaaaacaaatgccttatgtgagtcgtggtggcttgaaattagaaaaggcattacaagtatttaattttgatgtgaaagataaactaatgcttgatattggagcttctactggtggttttacagactgtgctttgcaaaatggggcacgacattcgtatgcgcttgatgttggctataatcaacttgcatggaaattacgtaatgatgaacgggttacagtcatggagcggactaactttcgccatgtgacgccagctgattttacggaaggcttagcggaattcgcaacgattgatgtttcctttatttcactcaaacttattttacctgtacttagaactgtgctcgtaacaggtggcgatgtgatgactttaatcaaaccacaatttgaagcaggacgtgaacaggtgggtaaaaaaggaataattcgcgacccagctgtacatgaagctgttgttgaaaacattgctctatttgcgcttgataatggttatgacttgatggggcttgatttttcaccaataactggtggagaaggaaacattgaatttattgcgcatcttaaatggactggcaaagaaactggtgaaaatcatttagagccagctgcaattacaaaacttattacaaaagcacatactaaattagataaataatgtataccggaaagcagtgatgttttccggtttttgcttttactatgctgtttatactcatttaagcatgtattttcaatgtatagagtattaaactagactttattgcataattttgcattaattccgtgactttatgcgttttttcggataagatgtaagtagaaaattatcgtgaggtgaagaaggaatgaataaaggtcatcgtcatattattattcgagaattgattacatctaatgagattgacacgcaagaagatttagtagaacttctgttagaacgcgatgttaaagtaacccaagcaaccgtttcccgtgatattaaagaacttcatctagtcaaagttccaacacaaactggtggctataaatatagtctccctgccgataatagctttaacccccatcaaaaattaaaacgcgctttaattgattgctttatttgtatcgatacagtgcaatttatgattattttaaaagtaatgccagggaatgggaactctgttggtgcgctaatagataacttagactggccagaaaaagcaggaacactttgcggagatgacacttgtttaatcatttgtcgctcagaagaaaatgcaaaaacattaacagatcgttttatagatatgctttaaaaattgttggaggtgaaggattttgcttcaagaaatgacaattaaaaactttgctatcatcgaatcactctctttaacttttcaagaagggatgacggtattaactggggagaccggcgcaggtaaatcaattattattgatgcgcttggtcttcttgttggcggacggggatcgactgattttattcgccacggtgaggaacgtttggaactgcaaggcttatttgccctagcagaagataatcttgcctgccgtaatgcacttttggaaaatggaatagatgcttcggatgatatggtcgttttggaacgtagcttatttcgctccggtaaaaatagttgccgtattaacggaaaactagtaactacggtgttgctacgtcaaatcggttctaaattaatagatattcatagtcaacatgaacaccaagaattaatgaatgaagaatttcatttatcgttactagataggtttgctgctgataaaattaaacccgctttaacgaaatatcaaactaattttaaagagtaccaaactattttgagagaatggcaaaattggacgaaaaatgagcgagaacttgcacagcggctcgatatgcttcgttttcaacaacaagaaatcgaaaatgcaaatttgcaagctggggaagaagatcgtttattagaacaaaaaaatgttttagcgaattttgaaaagttaaatgaaaacttgcaaggagcgtatacagctatccaaggagaaccgggcggacttgaatttattggagaagcaatgcgtcagatggaagcggctgcgagtattcatactgattataaagcagttagtgaagcaatatcatccagttactatatgcttgaagacagtatgagccaaattagacaatcgcttgatcagcttgaattccaaccagaagaactgaatcaaattgaatcacgcttgaatgatttaaatcaactaaaacgtaaatacggtaaaaccattgaagatattattcagtatgaaaaagaaattagtactgaaatggaaaaactgacggatagtgagtcccacgttgggcatttagaaactaaaatggccacattaaaaacagaactcacaaaacaagcaagtacactcactgacatccgcaaaaaagcagcaaccacgttagaaaaacaaattaaacaagaattaaatcaactatatatggaaaaagctattttcagtgttcactttgagtctgacaaaacagaattaacggaatcaggccaagacagtgtcgtcttctatatgtcgaccaatccaggtgagccgctaaaaccacttgcgaaaatcgcttctggcggtgagttatcacgaatgatgttagcgctaaaaaccattttttcaagacatcaaggcattacatctatcatttttgatgaagtggatacgggtgtaagcggacgtgtcggccaagcgattgctgaaaaaatttatgcagtctctgttggttcacaagttctttgtatcagtcatttgcctcaagtagctgcaatggccaatcaccattactacatcacaaaaaaagtgcaaaataaacggacaactacttccgtcacaattttaaaaggcgagcaaaaagtagaagaaatcagccgtatgattgctgggatagaagtgactgaactaacaaaacaacacgcgaaagaaatgattcaacaagctgaaaaagtaaaacaaacctattaaaaaaacgaaattgcttgcatatcgaatagtttttgcttaaaatgaataaggtagaaattattacctggtcataaaaacaactactaattcgaaatgcggcttttttgtgcgataaaggagttattttttatgacaagcaaaagatttttcaaagaagtggcagaaacgagttcgctggtttttgcagtagctggagcagatgatgaagtcgttttagaaaccatccgtctagcactggatcaaggtttaggcaagtttcttttatttggaaaaaaagaagatcgaagcttaacggcaaacgacagcgttacttggattcaagcgaatacagcagaagaggcagcacagggcgcgattttagctgtgaaaaataaagaagcagatattttggtcaaaggatttattccgacagctactttaatgcatcatgtcttaaaaaaggaaaatgagttgcggacagggcaattattaagccaaattgctattttcgatattccgacataccacaagcctttattattaacagattgtgcaatgaatgttgctccaaaaataaatgaaaaaatagcaattacagaaaatgcgctgaatgttgctcagaaaattggtataacaaatccaaaagtggctttacttagcgcggtggaagaagttaccgaaaaaatgccttctacggtcgaagcgaatgaagtagcaaatcatttcaaaggcaagatagatattgctggtccgcttgcacttgatgtagctatttcaaaagaagcggcacagcataaagggattaaaaataatgcggcgggtgatgcggatattttaattgcccctaatattgaaactggaaatgccctttataaatcgctcgtatactttgcgggagctagagttggtagtgctattgtcggagcaaaagtaccgattgttatatcttccagaaatgatacaccagaaaataaattagcttcatttatcctaactgttagaatggttggaaaataatgaaataatgtgaatagacggactttaatgatatgaatgcaaaggcttttatttgattacgccctacgtgttacaatagtccttgggaaaatgataacctacagcatttttcacaattaaatttggaggaaatcaaatgtcttatgatgttttgacaataaatcctggttccacttctacaaaactcgccgtttatcatggcgataaagtactttttgaagaaacagtcagacacacaatgcaagaattcgccgactttaacaatgtacaggaacaatttgattttagatggcaagttttgcgacgagtgattgatgcgtttggttatgatgtaaataaattagatgcagtagttggacgaggtggtttgcttcgaccagttgctggcggtacatatatggttactgaaaaaatgctagcggatttaaaaaacaacaagtacggtgagcatgcttccaaccttggtgctatgcttgctaaaaaattagcagataagctcggaataccaagttttatcgttgatcccgttgtagtagacgaaatgcaaccagtagctagattctctggaaatgaacttattgctagaaaaagtatttttcacgcattgaaccataaggcggctgggcgaaaaattgccaaagagctaggttcggaatatgagaaaatgaattttgttatcgcgcatcttggtggaggtatttccgttgcagcacacagacaagggaaagcagtggatgtaaataatgcactagatggcgatggtccttttagtcctgaacgatctggttcactcccaatgaatgattttttagaagcatgttttagtgggaagtggacgaaacgtgaactacacgagctaatcgtcggccgtggcgggatgatttcttatctaggaacaaatagtatgttagatgtagaaaataaagttcaagctggtgatgaggatgccatcaaagcttttgatgcgatggcttaccaagttagtaaagaaataggcgcatgttccgtcgttttacatggcaaaattgatgctattattttaactggtggacttgctagaagtgaactatttacaagtaaaattatcgagcaaacaaactggatagccagagtaattatagaacctggagaagatgaattagaagctctaaacagtggtgtacaacgtgttctcgctggaattgaaaaagaaaaagtgtactaaaggaggagataatgtggcaacagaatatgatgtagttattcttggtgggggaacaggcggatacgttgcagcgatccaagccgcaaagaacggacaaaaagtagccgtggttgaaaaaggaaaagttggtggaacatgtcttcaccgaggctgtattccaacaaaagctttattacgttcggctgaagtattgcaaacggttaaaaaagcaagcgaatttggaatttcggtagaaggaactgccggaataaactttttacaagcccaagagaggaaacaacaaatagtagaccaattagaaaaagggattcaccaattatttaaacaaggcaaaatcgacttatttgctggaacgggaactattttaggaccttccatcttttcaccaacagccggaacagtttcagttgaatttgaagatggttcagaaaatgaaatgctaattcctaaaaacctaattattgcaactggttcaaaacctcgcacattaaatggtttaacaattgatgaggaaaatgtattatcttctgacggtgcacttaatttagaaactttaccaaaatcgattattatcgttggtggtggagttatcggaatggaatgggcttcgatgatgcatgattttggcgtagaagttactgtgctagaatatgcggaccgaattttgccaacagaagataaagaagtagcgaaagaattagcaagactttataaaaagaaaaaactaacaatgcatacatctgctgaagttcaagcagctagttataaaaaaacagattccggtgtggaaatcaaagcagtcattaaaggcgaagagcagaccttcacagcagataaaatgcttgtttcagttggtcgttctgccaatacagaaaatatcggattacaaaacacggatattgcgaccgaaaacggctttatccaagtaaatgatttttaccaaacaaaagaaagtcatatctacgcgattggtgactgtattccgacaattcaacttgcgcatgtagcaatggaagaagggacaattgcagccaatcacattgctggtaaagaaactgaaaaactcggttatgacttagttccgcgctgtatttatacttctactgagatcgcaagtgttggtattacagaagaacaagcaaaagaacgtggtcatgacgttaaaaaaggcaaattctttttccgtggcatcggaaaagcacttgtttacggagaatctgatggctttattaagattattgctgataaaaagacagatgatattcttggtgttagcatgattggaccgcacgtaacggacatgattagcgaagccgcgttagcacaagttttaaatgcaaccccatgggaagtgggtaacactattcacccgcacccaactttatcagaaagttttagagaagctgcccttgctgtggatggtaatgcaattcatggttaatacagctttaaaggaggaacaaaaatgactttaaaagaagcaggtttaacagaagataaattaattaaaatgtatgaaacaatgttaatggcaagaagactcgatgagcgtatgtggttgcttaaccgttctgggaaaattccttttaccatttctggacaaggacaagaaacagcacaaatcggtgctgcatttgcttttgatttagagaaggactatgccttgccgtattaccgtgatttagcagtcgtattagcatttggaatgacagcaaaagatattatgttgtctgcctttgctaaagcggaagatccaaactcgggcggacgtcaaatgccagctcactttggtcaaaaatctaatcgcattgttactcaaagttctcctgtaacaactcaatttccacatgcagccggtattggtcttgctgccaaaatggctggagatgacattgcaatttatgcgtcaacaggtgaaggatcttctaaccaaggagacttccatgaaggaatcaactttgcatctgtacataagttgccagttgttttcgttattcataataaccaatatgcgatttctgtacctgcatcaaaacaatatgcagcagaaaaactatctgaccgggcacttggttacggtatccctggtgagcgcgtagatggctcgaatatgggagaagtatatgctgcctttaaacgtgcggcagatcgtgcaagaaatggcgagggaccaacattaatcgaaacagtttcttaccgcttcacaccacactcctcagatgatgatgatagcagttatcgttcaagagaagaagtcgacgaagcaaaaggaaaagatccgctgaaaattttccaaacagaattacttgaagaaggttatttaacagaagaaaaaattgctgaaatcgaaaaaagtattgctaaagaagttaatgaagcgaccgattacgcggaaagtgcagcatacgctgaaccagaatcatctctactttatgtatacgatgaagaagcgaatagctgattaggagggaatttgaatgccagtcatttcatatattgatgcaataacaatggcgcttaaagaagaaatggagcgcgatgataaagtatttattttaggagaagatgtagggaaaaaaggtggcgtttttaaagcgactgctggtttatatgatgagttcggtgaagaccgagttcttgatacaccacttgctgaatccgcgattgctggagttggaattggagcagcgatgtatggataccgcccagtagcagaaatgcagtttgctgactttattatgccagctgtgaaccaaattatttcagaagcttccagaattcgttaccgttctaataacgattggtcttgcccaatggttattcgcgcaccttttggcggcggggtacacggagcactttatcattcacaatcagtcgaaaaagtgttttttggacaacctggtttaaaaattgtcgtaccatcttccccgtacgatgcaaaaggacttttaaaagcagccattcgcgacaacgatccagtacttttctttgaacataaacgtgcctatcgtttactaaaaggtgaagtacctgaaacggattatattgttcctattggtgaagcaaatgttgtacgtgaaggcgatgatatcacggtcattacttatggtcttgctgttcaattcgcccaacaagcagcagaacggttagctgcagaaggcgtagaagcgcacattcttgatttgcgcacaatttatccattagaccaagaagctattattgaagcaacaaagaaaactggtaaagtacttcttgtaacagaagacaataaacaaggaagtatcattagtgaagtagctgcaattatttctgagcattgtctatttgacctagatgcaccgattgcacgacttgcaggaccagatactccagcgatgccatttgcgccaacgatggaaaaacactttatgattaatccagataaagttgctgatgcaatgaaagaattagcggaattttagacccgttttaaattaaaggagtgaagacccgtggcagttgaaaaaatcaccatgcccaaattaggggaaagtgtaacagaaggtacgattagttcatggttagttaaaccaggcgatacagttgaaaaatatgatgctatcgcagaagtacttactgacaaagtaacagcagaaatcccatcttcttttagcgggacaattaaagaaattttagcagaagaagacgaaacgcttgaagtgggcgaggttatttgtacaattgaaacagcagatgcaggaagttctgagcctgctgaagaagtagaacaaacagaaacaaaagctccagaaaaacaagaaacaaaacaagtgaaactagcagaagcaccagctagtggaagattttctccagccgtactacgaattgctggtgaaaacaatattgatttatccactgtagaaggcacaggtaaaggtggccgaattacaagaaaagacttacttcaagtcatcgaaaacggaccagtagctactaaaacagaggaaccaacaaatagagcacaagaaaaagcaccaactcctgcacctgttcgttccgcagctggcgataaagaaatcccaatcaatggcgtaagaaaagccattgctaaacatatgagcgtgagcaaacaagaaattccgcacgcatggatgatggtggaagtagatgcaactggacttgttcgttaccgtaatacagtaaaagatagctttaaaaaagaagaaggttattcattaacttatttcgcctttttcatcaaagccgttgcacaagcattgaaagaattcccgcaacttaacagcacgtgggcaggcgataaaattattgagcacgcgaatatcaatatttcgattgcgattgcagctggtgatttattgtacgttccagttattaaaaatgcagacgaaaaatccattaaaggcattgctcgcgaaataagcgaacttgctggaaaagcgcgtaatggtaaactaagtcaagccgatatggaaggtggcactttcactgtgaatagtactggttcatttggctctgttcaatcaatgggcattattaatcatccacaagcagctattcttcaagtggagtccattgttaaacgtcctgtcattattgacgatatgattgctgtacgagatatggtgaacctatgtctatccatcgatcaccgtattttagacggcctactagctggtaaattcttacaagcaattaaagccaatgtcgaaaagatttccaaagaaaatacagcattgtattaaaaatgttttaatctaggtttagcgggtattgtttagtacatctagatccatacccctaaactccctagatgtcttgggtagtactttcgggtgctgctctttttttgaggaaaaaaataaaaaaagcctgaaccaaattggctcagacctcggatgtctataaaaacattagtaacccggttaaaacgctggataatacaatcgcgattaacattaaaataacgacaacgcgaactacttttttattagtcattgcggaagaaaactcctctcataaagcatttcagatatatccatcttacttataattacagtaaatttcaagtggtttatttattttttaagcaaaaaggaagaatgtaggtgaaaacaagatgatagctaatgtaaaaaaatattttacagaattaattcaaatcccatctgtttctgggaaagaaaaagcagtgttaacttacataaaaaaacaaataacaaaattaaatatcccctacagtttagatgaggataacggattaattgcgcgaattcccgcaacagctgtgaaattcccgaccattttcttttgtggccacgttgatacgcatccaaatgcagcttcaccagaatttcaagtagaagatggcatatttacttctctaaatgggacttctttaggggcagatgataaagcagcagtagcagccatgttagcggcaatggattattttagtacagaagaaacgcctcatggggaaattgaattcattttcactactaaagaagaactgggcatgattgggatgcgtttatttccagaagaaaaaataacagcagcgtatggttattgtctcgatgctcctggagaagttgggaattatcaattacaagcgaatacattagttgcagttgatttcacgattgcaagccctgatgcgacccagatgtcacccatatcagtagcgagaatggcgcttcatgcaacgagaccaggccggattgaccgcgagaacagatgggaaatccagtcgttttctggtggagtaaatgatgaaaatcaacaagatgcccaattagaagttctgttcaaatctgctgctagttttaggaaggcgttacctcatatccaaacaatcagagaacgttttaatcaaacctgtgagaaatatggcgctacattagcagaagatacaagacttatttacgaaggctacaaaatccacccgcaacatccacttatgaatatttttcaaaaagcagctaaaaaacaagctttaaagactagcgagatctttttagaaggcggtactgatgccaacgtgcttaatgaaaaaggcgtgcctacaatgctcttatcagccggttatgtacatgcccattcagaaaaagaaactatttccgtagagcagttagaaaaactgacacaactcgtcattgacttagctgaatcggcaaaaaatgagaaaattttactgagaaagctaaattaataaaaaaaagtcaaataattcggattgattcattgtccaagaagcaattctttgatatagtaaatgatgttgatacttttatgtgtcatgttgaagtaagacagatttttctgccttaataaaccggaaaggaagaagtgcaaaatggcaaaacaagaaattggcgttataggaatgggcgttatgggtcgtaacttggctctaaacattgaaagccgcggtcatacagtatctatctttaaccgttctactgaaaaaacgaaagcggttatggaagaaaatgcggacaaaaaattagtaccaacttatagtttagaggaatttgtcgaatctcttgaagtgcctcgccgtatccttattatggtaaaagctggcgatgctacagatatgatgattgaagcagttaaacctttcttaaacgaaggcgatattttaattgatggcgggaatgctttctttaaagatacaattcgtcgtaataaggaattaagtgaagaaggctttaacttcatcggaactggcgtatcaggcggagaagaaggcgcacttaaaggtccttctatcatgccaggcggtcaacgcaaggcatatgatcttgtagctcctatcttacgtgaaattgctgcagtagcagacggagaaccatgtgtgacttatattggtccagatggtgccggacattacgttaaaatggtgcataatggtatcgaatacggagatatgcaattaatcgcagaagcttacactattttgaaagaaatcggtggattaagccatgatgaacttgctgacgtatttgaagaatggaataacggagaattagatagctatttaatcgaaatcactaaaaacattctaaaagtaaaagacgaagaaacaggcaaaccaattgtcgatgttattcttgataaagctggacaaaaaggaactggtaaatggactagccaaagcgcacttgacttaggtgttccactttccttaattactgaatctgtatttgctcgttacatttctgcactgaaagatgaacgcgtttatgcgagtactgttttatctggtccatctaattatcgttttgaaggcgataaaaaagcatttgttgaatctgttcgccgcgcactttatttcagcaaaatcgcatcttatgcacaaggttttgcacaaatgagagcagctagtgaagagaacgattgggacctacaatacggcgaaattgcgaaaattttccgcgctggttgtattatccgtgctcgtttcttacaaaaaattactgatgcatataataaagataaaaatcttaaaaacttactattagatccatatttcaaagatattgcgcataactaccaaggcgaccttcgtactgtagtagcagaagctgtcaaagctggtattccagtaccaaccttcactgcagcaatcagctattacgatagctatcgttctgaagtattatctgcaaatctaattcaagctcaacgcgactactttggtgctcatacgtatgaaagagttgacaaaccaggcgtattccatacagaatggccacaagttgaagattgatttaaaattaagcatccactttcacgagtggatgtttttttatgagatttaaattagtaaataatggtaaagtgctaaaaaatacaggaaatatctatttatgcgctattattagttgtttttgagccaaagttcgttacaatagtaataggaatatagtgtaatgatcgaaagagagggttaggccaaatgaatagaatattaatcgtagaagatgaaaaaaacttagcacgctttattgaactagaattacaacacgaaaattatgaaactgctgttgctaatgatggacgtgctgggctagaactcgcactaaatgaagaatgggatgctattttactagacttaatgttaccacatttaaacggggtagaggtttgtcgtcgtgtacgccaagtgaaacaaacacccatcattatgataactgcgcgagactctgtgattgatcgcgtatctggacttgaccacggagcagatgattatatcgttaagccatttgcaattgaagaactacttgcacgtctgcgttcactattacgccgagtagaaaatgcagaacaatctgctaaacaaacaacgctacaataccgcaacttaatcgttgaaaaagaaaatcggattgtaaaacgcgatgaagaaattattgatttaacaaaacgcgagtatgaactactacttactttaatggaaaatgtcaatattgttcttactcgggaagtattacttaacaaagtatggggttatgaaacagaagtagaaacaaatgtagtagatgtatatgttcgttacttgcgaaataaaattgatcatcctgacgaagaaagttacatccaaacagttcgcgggactgggtatgtgatgcgtacatgacaactagcccattctccttaaaaagtcgttctttgaaatttaaatggacttttggagctagtgcagcgatttttctaacatttttcttattttcctatgcgatttatcaagggattgggcaaatgttgctaaatgaagaagaaccggaagtaaaagaactgcttctagcaactacaagtacgttaacaaaccaagatttaacggacaatgaggaaatcaaatatttatttaataacgataaaaccgttaatcgtaaattacaagatcaagtgattaatctatacgataaagatggtcattttattaataagtattatttttccagaaaccaagatattacgagtatcgatttttcgcagtattttgttagcggcacggataaatttattatgaataagccaaccattgaagggcagaaaatgatgactgcacaaatgccaattgtggcagatgataatacgacagtgatcggttatgcgcaagtggtaaatccgctaacttcctataatcggatgatggaccggcttctagtaacaatgattttgcttggagcagtagcgctctttattagtggaatgctcggttacttactagcacagaacttcttaaatccactcactcggttagcacgtactatgaatgatattcgtaaaaatggttttcaaaaacgaatcgaaacgaaaacgaattccagagatgaaattggcgaattgacagttgtttttaacgatatgatgacgcgaattgaaactagttttgagcagcaaaaacaattcgttgaagatgcttcccatgaactgcggacaccagttcaaatcatggaagggcacttaaaattactaactcggtgggggaaagacgacccggcagtactggatgaatcgttaaatgcttcgttaacggaattagaacggatgaaaaaattagtacaagaaatgctcgatttatcaagagcagaacagatttctcaaacgaaagaattacaaattaccgatgtaaacgcaacagttgagcaagtgagacgtaattttgaagtaatgtatgagaactttacgtttactttaaaagaagatgatacggatttacgagcgcttattcaacataatcatttagaacaaatcttaattattattatggataacgcagtgaaatattcgggtgatggcactgaggtggatatgcatgtctataaagaacaaaagcaaatccatattgatgtgcgcgattacggagaaggcatctcacaagaagaaattgataagatctttaatcgtttctatcgtgtagataaagccagaagccgtgaaaaaggtggtaatggcctcggacttgcgattgctaaacaattagtcgaaggatatttaggaacgattaatgcggtcagtgagccggataaaggtactactataaaaattacgcttccatacattgaaccgaaatccaaatagaaaaaccgcaaccttataacgaggttgcggtttcttttatttttctttattttgttcttctacaatttgttcaaattctttttcttcttgttccattactttgatttctggatgtttattcatataaagtttcttcgttagtaatgtttgaccagctaagaatagtccgccgacagcccaatataacgctagggcagaaggagctgtgaaggaaacgaataaaatcataattggcgacattaagccgataattttcatttgtttcttttgttctggtgaataaccaatcatggaaacaaaatattgtgctaagtagacaagacctgcgattatcgcaagtaccatatctggtgaacctaagttaaaccataagaatgtgtgactagcaatttcggaagatccgcgaatagcataatagaacgccatcaaaatcggcatttgaataagtaatggtagacaacccatttgtatcggattgatattatacttggaataaacggccatcatttctttttgaatatttgcttgttcttctttcgatgtagcacgttttagtcgagcttgaatttcatcgatttctggtttggcaactgccattttggattgcatgcccatttgagctttagcagtacgtaagtttagtggcatgatgagtgcacggataagtaacgttgtaataataatcgcaatcccgtaattacccccaacaaactttgcaacgaacataataaagctagtaaatggttggattagataagtactgaaaaaaccatctgtattttgtgacgggtccatactacaacctgtaattaatagtagagcacctagtaatacgctaattaaaataatatttttctttttcaatgtttcattttcctcctaaatagtaaaataatcatttcatctgttggaaaatgaaaaactgtcttcatcatcagtaatggcgctacatttcttagtaatagccagccaattaataataaaattaggcgaggttctaacaaaatgtgctcgaagtaaagtctttactggctttaagcaggtagcgtcagcgggtagcaccattttcggttttaataatgtaatggccgaccaataactaaaaatcgtcaacattaataaaaacgtcactgtgagtgaaatgaattctggttcaagtaagatttgcaaaatggaaatcatgccacgcagtcgctcctttcaaggttttagtactcattaactataatgcaaaaagagctatagcacaaccactatttttggatttttaataaacaatatcaaacgtttttcgatcttcaacaggcgcacctttataaatgtaaacatgttcgatacggcaaccaggtgaaggtcctttttttattgcatcaataaatttatttaagttttcttcttctgcaattgcatgaatttcaacggaaccatcgtctaaatttttcactgttccactaatgtcatatttgtaagcgacgtgttttgttgtgtaacgaaacccaacaccttgtacaaatccagttactctcaaaatcgctgtatctctagccatgacgaaaccaactccttttatttttccttactaccagtgtatctttttttgttgttactttcaaaaatttgcattccagtatttcaaaggagcttatgctataatatgtgtattatatttagtgttgggagtttttgatatgacaaaatggaatgtctatctaactaaaggagaatacgagccttggtggttttttgaggaatgggaaacttctattcaagcagactttactttttcagaaaaagaagctgcgtttgcgaagtaccaagaattagcagaaggtttactgagaaattaccctaaccatcaaacaaagaaagattgtttgttagcggcttggaatgaggaagaagtagaatattgcgaagactgtgaagacgatattcaaacttttcatggacttattttattttttaatggagaagtatatcaaccaacttctgaagagaaagaaaccatttttaaaaacgttttaacttttgcttaaggttagaaagaaattagcgattttttggaggattaatacatgcagaagaacgatgacttattacgagaacgccggaaagacgaacatgttgctcttggtgtaaagcaaaatgagaacttagctccgtcgagtttagaagatattcaattgattgggacatctatcccgcgctacaatgtgaaagatattgatctaacaacaacttttttaggagcaacagtaccatttccattttatattaatgctatgacaggaggaagccggcatacaaagagaattaatgccgaactcgctgaaatagctcgcgaagtagctatcccgatggccgttggttcccagtctgcagctctaaaaaacagttcgctaatagatacatatcaagtcgttagagaagttaatccaaaaggtatcattttagccaacgttagcccagaagtggatattcaagacggaattcgcgcaatcgaaatgttagaagcagatgcgctacaaattcatataaatcctgcgcaagaattggtgatgcaagaaggcgaccgttcctttagtcactggttatcaagaatcgaagcatatgtaaaaaattctccagtaccagttgtcgttaaagaagttggttttggaatgacacgagagactgtaaagactctagctgaaatcggcgttacaacagtagatttagccggaaaaggtggaactaactttgcgcaaattgaaaatgatcgccgccgcgaccaagcctataattttttacttgattggggtatttcaactgggcaagcattaatagatatgcaacatgctgacgcgccaaaaatagcatatttagcatctggaggtattagaaatcctttagatattgtcaaagcacttgcgctaggagcagatagtgttgggatggctgggcaaattatttcttcactgaaaaaagatggcgtatcaaaaacaatcgaaaagttagaactttggaaagaacagttgcgaggactctttgttttagcaaatgcgaaaaatattgcagaactaaaagaaacaccattaattgtaagtggtgaacttgcaaaatggggtagtttacgagaaattgatttagttcaacttgcaaatagaaaataaaaaaaccagcagctattcatttagcaatgctggtttttcgtttattgaaccgtttccggtaaagtttcatcaatcgcttgaagtcgttctgtaaattcttctttagataattcttttgtataaagatttgccgggtgaacgcggcattcatgcgaacaactacgcaaatattttttttcgttttctaaagaagcgagaatttgtttattacaatatggatttgcacaattgatgtaacgttcgcaaggtgttccgtcaaagtaatctttccctacaatagtaggatttacttggttaattggaacggcgattctttcatcaaagacgtacatttgtccatcccatagttcgccttttgtttcttcatttttaccgtacgttgcaatgccgccatgaagttgacttacatcttcaaagcccgcagttttcaaccagccagaaaatttctcgcagcgaattccaccagtgcaataagtaacgatttttttatcttctagttgatcgcgattatcttcaatccagcctggtagttcacggaagttctgaatatctgggcgaactgcaccacgaaaatggccaatatcaaattcataatcattccgagcatctaaaataacagtatcctcgtctagtagtgcatcgcgaaattcagcaggttctaaataatcacctgtaatttcaagtggattgacatcttcttctaaacttaaactaacaatttcagcacgaggtctgacatgcatttttttgaaagcatgggagtcagccgcgtcaattttaaataccatatcagcgaagcgagcgtcatttgccatataatccatatatttgtttgttgcttcaactgttcccgaaacggtgccattaatcccctcagtagccaccaaaatccggccttttaactccatttctttgcaagcagcaagatgctcttttgcaaaagtttctggatcatcaatcgttgtgtatttgtaatataacaacacttgatagtcactcataatcttatcacccttcaaaatgtatttcatgtgtaagaaaaattctccacaagtttgcgcattaatactatactatagcaaattaagactggcaagtaaccgaaccgtaaaataaatgcttcttatagttaactatatgtacaagtacaaaacagctatggtatacttattaaatatgaagcgaaaattttgttgatgaaagcaaatcctgttttcattgcctaaaataaagaatgaagtaaggattgggcgtgagctatgtgcaaataaatgaatcgtttatggaagaactagctttaaaaaaagtaaaacaagaacgcagaaaaagactgaagtggtttgtttataaatttctaatgattacctttggggcgattttaatgggggtaggtttagaacttttccttgtaaacaaccgaattttagatggtggagtcgttggtatttccattattatttctcagttaacaccgctacctttaggggttttaacttttgtacttaatattccatttttcattattggttaccggaaaatcggaaaagtttttgcactttttactttgtacgggattgcagttatgtcgatcgtgacacttgttttacatgatatggacccagtgacagatgatttattacttgcgactgtttttggtggaatgacactcggtcttggtgtaggacttgttattcgtaatggtggagcacttgacgggactgagattatttccatcatcatcaacggaagaacaccattttcaaccgggcaaattattatgtttatcaatattgtgattttcatcgttgctggacttgtatttaactgggacagagctatgtattcattaattacgtatttccttgcgtataaagttattgatattgttattcaaggtgtagatgaatcgaaaagtgcttttattattagtcgctattacgaggaaatcggtgcagaaatcatggagcaactaggaaaaggcgtaacatacttagatgcaactggtggatactctggtgatgtaagaaaagtagttttcgttatcgtctcaagatttgaagaagtgaaagtgaaagctattctggacgaaatagatccagatgccttcttagctgtcgggggaagcatgtcagaagtccgcggcggaaagctgatgaatacgaaaacaccacacctataacaaatctaaaaccatatgtctcttacttgagatatgtggttttttgacgaaaggaaacatttgtttgtataatagggctatagtatgagctacaggacggatagatgtgctataataaaacaagcaaaaaaggaataggtgggacttgaaatggcgacacaaaagaaaaaaacggctgggcgaaagaaaacgtccacacgttcaaaaaagaaaaaatcagcttcttttcgtttagagataacgggtgctgttctgatagcaatagggataatcgggattttacaattaggttttgttggcagaggtttctttgccctggctgaaatgtttgttggtcttcttagttatgtattacttgctgggagtatcgttctcggcggatacatggtaattagaagaaagatgccacacctttttagcaaacgattagtaggtgtttatctcattgttttagggtttttaacatatatacatatgtatttcatcatccataatttaggtgccaatgcgcctgttgtttctagtacatggaaattagttctagaaaatttatttagaccaaatcaagtaggttttgttggtgcaggaatgattggggctgctattacttcagttacctatttcttactagaccgacttggaacaaatattattgccattcttttaatcatttatggattttcactagtatcaggtatttctgtacgccaattcttctcgaaaattactgaattcgttcgctacttattttcaaaaggaaaggctgctaaggaaaaagggaaagaagtaaaagctaaacgagataaaaagaaagcggaaaaattagttgaagtagaagcggatgaagtaatcgaggtaagccaaccaatagatgcttcaaaagaagaaaaaacaccgccaattatttcgaattttagttctaaagtagaacaagaaaaagcccctctagaagaaaaaacagagtccgatgtgaaagaaaaagatttagaaatgttccaacaagagtcttttgaaaatgaaatctatcaattaccgtcagtggatattttagaacctgccaaagtaactgatcaaagtaaagaatacgatcaaattaaagttaatgcgaaaaaattagaagacacattcgaaagttttggtgtgaaagcaaaaatcactcaagtgcatcttgggccagccgttacaaaatatgaagtgcaaccgtcagtcggagtcaaagtgagtaaaattgtttccttaagtgatgatattgcgcttgctttagcagcgaaagatattcgcattgaggcgccaattcctggtaaatcagcaattggaattgaagtagcaaatcagaatgtagcgatggtttctttacgggaagtactagaaaataatccgaaaaataacccagatgaaaaattacaaattgctcttggtcgagatatttctggtgaagcaatgatggcaagtcttgataaaatgccccatttacttgtagcgggggcgactggtagtggtaaatcggtttgtattaatgggattattacgagcattttgcttcgagctaaaccacatgaagtaaaaatgatgatgattgatccaaaaatggttgaattaaatgtttataatggtatcccgcatttactagcaccagttgttactaatcccaaaaaggcagctcaagctttacaaaaagtagttgctgaaatggagcggcgttatgatttattttcgcatacaggcacacgaaatatgcaaggttataatgattacgtaaaaaaacataatgaacttaacgaagaaaaacaaccggaattaccatttattgttgtgatagtagatgagttagctgacttaatgatggttgcttctaacgatgtagaagatgcgattacacgacttgcgcaaatggcacgtgccgcgggaattcatttgattatcgcgactcaacgtccatctgtggatgtaattactggagtcattaaagcgaatatcccatctcgaatcgcttttgcagtatcaagctcgatagattcaagaacaattcttgatatgggtggagcagaaaaactactaggtcgcggagacatgttgttactaccagtcggttctagtaagccaactcgtattcaaggcgcctttttatcagataaagaagtagaagatgtagttaattatgttatctcgcaacaaaaagcacagtacaacgaggaaatgattcctgatgatattcctgaagttgaaggagaagtaacggatgaactttatcatgaagcagtcgaactagttgtagaaatgcaaacagcttccgtttcgatgttacaacgaaaattccgaattggttataaccgggcagccagattaattgatgaaatggagcaaagaggagtagttggacctcatgaaggtagtaaaccgcgacgagtcaatgtggaacttcctccagatatagaataaataaaaagaggttgcgactaaaatcgcaacctctttttttaagaaagtagatctcgtttttgagcttcaatttcttttttacttgtagcgtattttccttgagtacggtcaagtaattcatcgaaaaaagaaggtaagttgcttttgctaagttcaacgccttcagctgtaatcccgccttttgtagcaacacggtcgattaaaccgctaaaagtataatcttcctccactaagagtttagaagtcccagctaaagcaaaattaatcatttgaaaaatttccgcatctgacaaagtcgatctgcgaagagccgcttccacgaattgttcgaaaatagccgctataataccaggtgaggaactcgttaagtcactcgcaatgtcaatattttcttctcgaattgtcatcacatgtccgaaattttcaaaagctgattctaaccaagcgctgttcgtttccgaaacagtatctgcgtgtgaaattaaggtagttccaacactaactactgttgtgattgaaggtattaatttacttacttgtaaactcggagatagttccaaaatatcagaagtactaactccagctgcaatcgaaatcacgtggcgatctgccgttaatacagcctcgcaatctttaataaggggcaatacagctaaaggtaatttacaaataaagctgtgatctgcttttgtaaaaacttctgcttcattggctgctaattcggttgtaggatatttatcataaaattgcttgaaatggtcgtttgccgaactagagtaaaggatgatttcctctggagtacaaacctttgtttcaatcaatttagtggctatcaacgttgccatactcccaaaaccgataaaacctatttttgtcattttcatcccgcctttcatcgttattttttattatgaagggaataaaatcggattgcaaatatatcagattgtttgctttttcacgttaacgcgcttccacctagggataagcttgaaatcgaatgattccgacagaattaaattttctgaattcatttgcattaaaaatttatgaagttggttatttatttattttattttccatgttatattaagaacagttagagaagacgttaaatgtttttgtgcgttttccgaaaaagggaccatacataattttttaatacgcgcctgaatgtttgttttgacagaaagctctgactaacattatatctctcgggaggggttttaaggtgaaaaagcgtacatttgctttagcactatcaatgattattgcttctggcgttgtcttaggtgcttgtggttcgagcagcgacgataaaaaaagtggcgatgataagagcagtaaagattttacagtagctatggttacagatactggtggcgttgatgaccgttcatttaaccaatcagcatgggaaggcttacaaaaatttggtaaagctaacgacatggaaaaaggtacagacggttataactatttgcaatcagcttctgaagcagactacaaaacaaacttaaacactgctgttcgtagcgactatgatttgatttatggaattggttacaaactgaaagatgcaattgaagaagtttctaaacaaaaacctaaaaatcaattcgctattgttgatgacacaattgatgaccgtgataatgtagtaagtattggatttaaagataacgatggttcttacctagttggtgttgtagccggcttaacaacaaaaacaaataaagttggatttgttggtggggtaaaaggagctgttatcgaccgttttgaagctggtttcactgctggtgtaaaagctgttaatcctaacgcacaaattgatgtacaatatgcaaacgatttcgcaaaagcagacaaaggacaacaaattgcttcttccatgtattcaagtggagttgacgtaattttccatgctgctggcggtactggtaacggtgtctttgcagaagctaaaaacctgaagaaaaaagatcctagccgtgctgtttgggtaatcggtgttgaccgtgaccaatgggacgaaggaaaagttacagcaaacgatggcaaagattacaatgtaacacttacatctgaaatcaaacgcgttgatatcgctgtagatgaccttgcaactcgtactaaagctggagatttccctggcggaactaaaattgaatatggtcttgataaagatgctgtagggctttctgaacatcaagataatatttctaaagacgttttagctaaagtagaagaatacaaacaaaaaatcgttgatggggacattaaagttccagaaaaaccttgattttatagttataaaaactgagtaatatgaacgaagtaaaaccttttatgaaagtcggtattaagcgtaccggctttcataaaaaaataatttgtaagcgttttaatatgataggtaaacccttttactaaaagaaaataatcggtatattggaatttatgattgcaatgaatgccatttagaaataaaataaggagatggcttttttaaccgcttaaaaatgtgaggacaagcttttgtacatagatggtataatgaaacgtatttagcaacataccgaagcactttagcgaaaaaagtcattgaacaacaaacggataaaaaactcggaaccttcttcgggaggaagtacggggagaggcggcgtccttcgagagaatcgcgcgtgtggctgtttttccagtttgaaccagacgacaaggggagtgaagaagtggactttgttattgaaatgttaggaatcaggaaggaattctctggatttgtagcaaatgataacatcaccttacagttaaagcagggcgaaatccatgctttgttaggtgagaatggcgcaggaaaatctacgctaatgaacgtcttgtttggtctatatgaaccagatggtggagaaattcgtgttcgcggtacgaaagaaaatattaatagcccgaacaaagcgaatgaacttggaatcggaatggtccatcagcatttcatgttagtggataaatttacggttgcagaaaacatcatccttggtaaagagccaagcaagctcggagttatcgagaagaaaaaagcggtagaagaaattaaagaaatctctgaccgatatggtttacgagttgatccaaatgctgttgtccgcgatatttctatcggaatgcaacaacgtgtggaaatcttaaaaacactatatcgtggtgctgatatcttgatttttgatgaaccaacagctgttttaacgccccaagaaattaaagaattgattcaaatcatgcgttctcttataaaagaagggaaatcaattattttaattacacataaactaaaagaaattatggatgtttgtgatcgcgtaactgttatccgccgtggtaaaggcatgggtacagtaaacgttccagaaacaactccgcaagacttagctaatttaatggttggtcgtgaagtcgtttttacaacggaaaaaatcgctgcaactcctgggaaagacgttttagaagtaaaagatttagttgttaaagaaagccgcggcgtcgaaagtgttcgtggacttaatttgactgttcgagcaggcgagattgtcggaattgctggggtcgatggtaatggtcaaagtgaactcatttctgcaattgcaggtctttctaaagtaacaagtggaagcattcttctaaatggtgaacacattgagaataaaaaaccacgtaaaattacggaagctggtttaggacatattccagaagatcgtcataaacatggtttagtacttgagatgtcacttggagaaaatattgctttacaaacgtactataagaaacctatttctagtaagggtttcttgaatcacaaagcaatgtatgactttgcacgcgagttaattgaagaatacgatgttcgcgcaagtagcgaatatgtagcagcaaaatcgctttctggtggtaaccaacaaaaagcaattattgcgagggagatacaccgtaatccagatttcttaattgcggctcagccaacacgtggactagatgttggagcaattgaattcattcatagacgcttgattgaacaacgagataacggaaaagctgtattacttatgtcgttcgaattagatgaaatcatgaatgtaagtgaccgtattgcggttatatacgaagggaaaatcgttgctattgttgatccgaaagaaacaacggagcaagaacttggtctgatgatggctggttcatccaaacaggaagcggaaatgggggagaaagagcatgtctaaacgactacaagcattagttatcccagttacagccgttatccttggacttatctgcggtgcgattatcatgcttatttttggatatgacccaattgctggttattcagcacttatagaaggtgtcgttggtgaaaatttctatattggtgaaacaatccgccaagccacaccttacattttagttggtctatctgttgcagttgcatttaaagccggacttttcaatattggtgcggaaggtcaaatgctgatgggctggttaggttccattatcatcgctgtaaactttgatggtttaactaaatggattcatttaccacttgcgattattactggtatggtttttggtgcactttgggcattcattccaggtattttaaaagcaactttacgagtaaatgaagttattgtaacaatcatgcttaactatacagcactttatattttcaactatgtagtacaaaatttacttacagacggattagataaaacacaagaaattcatgcgtctgcgtctttacaatctgaattattgcaatcaatgactgattattcgtcactacattgggggattttaatagcccttggttttgcacttattatttggttaatgttaaataaaactacttttggttatgaaatcgaagcagtcggatttaacgaaaatgcatcgcaatatgccggtatgagtgtaaagaaaacaattatcttttctatggttattgccggagcgctcgctggtcttggtggcgtaatggaaggccttggaacttatggaacggcttatgtattaacttcttctccaggaattggttttgacggtattgccgttgcgttactcggaggaagttctccaattgggattgtcttctctgccatcttgttcggcgctctaaaagtcggagcactaaacatgccagcagttgcaggcgttccaaacgaattagtcaatgtaattatcgctctgattatcttctttgtggcatccagctacattatccgctgggcgatggcaaaatttaagaagggggcgaaagcagaatgacagccattttagcgacaattgtttctagtacactgcttatggcaggcccactaatttttaccgcactcgggggcgtttattcagaacgaggcggtgtggttaatattggactagaaggtatgatggttatgggagcattctcagctatcgtctttaaccttactttccaagatacttttggcaatttaactccttggatatcacttattgcggctatggtcgttgggggattattctctcttgttcatgccgttgcaacaattaacttccgcgctgaccacgtaatcagtggtgtagcgattaactttttagcaactggtctatctttattccttgtaaaagtaatttatgataaaggccaaactgaccaaattaaatattactttggtaaaccagatattcctgttttaagtgatattccagttattggtgatattttctttaaaaacattccggtgatgagttatgtggcgattctatttgcaatcgcatcgtggtttatcatttataaaacgcgctttggtttacgtcttcgttctgtaggggaacatcctcttgcagctgatacgatgggaattaaagtacgttggatgagataccaaggtgttatcatctctggtattcttggtggtctaggtggtgcagtttacgcgcaatcctttacacttgatttcggacacgcaactatttccggtcaaggttatatggcccttgcagcaatgatctttggtaaatggaatccacttggagcaatgggagcagcaatcttcttcggttttgcgcaatgtttggcaattactgggggctcgctaccgtttttcaaagacattccagacgtttacttacaaattgcgccttatgtattaacaatcctcgcgcttgttggatttatcggtaaatccgaagctccaaaagcagatggtgtcaactacattaaaggcaaataaaacattaggacagcctagatattattctaggctgtttttttatgctagaaaattgtgtgtggcaacaacttaggatacaataggaaagtgagatcattgcttgaaaggagcattataatgacagacaaaatatttcaagaaaaagttggtccggttgcactaacaatcgttcccacccaaaaatataaatctaataaaattgtttttaaatttcgcgctccattagagagagaaacagttacaaaaagatcattattatcaattttgctagaaacaaacagtgaaaaatatccgacgcaaacggctttcagaaaacagttagctaacttatatggcgcaaacttctatacaactacggccaaaaaaggaaatgaacacgttttaactgtcgttttcgatatgatagacggtcaatatgtttctgatggcgagaatattttaaaagatgcatttgcttttattgaacaagctatatttcagccaaatgcaacaaatggcgcttttgatgaagaaatagttgttcgtgaaaaagagaatttaaaaagcagtttagaaggaatttatgatgataaaattcgttttgcttctaaaagactagtagaagaaatgttccgagacgatgaattccgcttcggggcggcaggggttttagaagacgttgatgccattacagcaaaagatttatatgaatactatttgaaattcatcaaagaagatgtcattgaaatttttatctgcggcgatgtaacaaaagaagaagttatgccgcttatcgaaaagatggctttttcaccgcgtccagaacgaaaaggtgttttctatacaaaagaggccccaaaagaaactcgtgtcatccatgagcaacaagcaattaatcaagggaaactagtgcttgggtatcaaacagaaacattatttggagacgatgattttgttgctcttcaactcgctaatggacttttaggtggctttgcaaattccaaaatctttatcaatgttcgtgaaaaagcaagtctagcttactatgcttccagtcgaattgattcttttaaaggctatatgataatttcagctggaattgatgaagtgaattataaacaagctttaaccattattgaagaacaaatcgtcgcaatgaaacaaggcgatttcactgaagacgaattaaatcaaacaaaagaaatgctcattaatcaattgcttgaaacaaatgaccaagcacaaggtttaattgaacttgcttataataacgttttacgcgaagcaaacttagacctagaaaattggatcataaaaattaaacaagcaacaaaacaagaagtagttgctgctattaataaaatcaagccagacacaatatatttcttgagcaagggaggagaagaacttcatggaaaaaatcacatttgaacaagtaaaagaagctgtatttcatgaaaaaatgtctaatggtttacaagtctaccttcttccaaaacaaggatttagtaagacgtatgctgtttttacaactaactacggtgcaattgacaataatttcgttccaattggcgaaactgaattcactaaagtacccgatggcatagctcattttttagagcataaaatgttcgaaaaagaagacggtgatgtattttttaaattcggtgaaaaaggcgcttttacgaatgcctttacttcatttacaaaaactgcctatcttttctcaagcacctctcgtgtagaagaaaacttagaaacattaatcgatttcgtgcaagaaccatattttacagaagaaacagttgaaaaagaaaaaggaattatcggccaagaaatcagaatgtatgatgatgatccagattttcgcgcttactttggtgtaatcgaaaatatgtatcacaaccatccagtgaaaattgatattgctggaactgttgaatcaattgcagaaattaacaaagatttgctgtacctttgttataatactttttatcatccaagcaatatggtactgtttgtcgttggtaacttagagcccgaagaaatgatgaaccaaattcgtgcaaatcaagcgaaaaaagatttcacagaagctgctccaatcaaacgtcattttccagaagaaccaaaaactgtcgctgtaaaagaacgtaaaattcactttccagtacaaattgctaaaaatatggtaggtattaaagaagatataggctctctagaaggacaagtagcacttaaacaagaaattattggtgatgtagcgcttgaaatgctttttggaactacatctgatacttatttagaattgtacaaccaaggaatcattgatgatagttttggttatgattatacactgcaagacagtttttcctttgtccttgttggtggggatgcaaaagacccagatatgcaaacaactaaaattattgaggcgattcaagcagcagctaaaaacggcttaaatgaagcggatttagctttagtaaaacgtaaacgtattggacaatttttacgctcgcttaattcaccagagtttattgccaaccaatttagccaatatgtaatgaaatctgcttctctctttgatattttacctttaatggaaacagttacattagaagaagtaaataattttgtgaaaaacctggacagtgaagagcgcactactagtttccaattgcttccagaaaaataatcgttctgtgtcttttttacttttttttgtataaaaaatggcataaattcctgagtcatgctatcataaaagaaatagactggaaagggttgcctttttttggataaagatataaaatatgcttttgtaactggagctagcggagaaataggtcaagcgatttgtatatcacttgcgaaagctggctggaacttgtatcttcattatcatcaaaataaacaagctgtggagaatttattaccactactacaagctgaaaaaatagatgtatttcttattcaagctgatttcgatgatgttgcaagtttagcagaaatggaaaagcaagtttttcaagtagatgcatttatccatgcagcagggcattctcactatgctttattccaggatacaacagatatagagactacaaaattatggaatgtgcacatgtttatgccaatgcgtttaatccgcactttcataccaaagctaatgaaaagcaatcaaggaaggattgttttcatcagttctatatggggagaagtcggagcatcaatggaagtagtttattccactgtaaaaggggctcaaatcgccttttgccgagcactaagtcaagaattagggccttctggaataactgttaatgcagtgacaccaggagcggtagaaacgaaaatgatggatcaattttcagcgaatgaaaaggaagaacttcgtgaggaaattcccttgaaacgctttgcaaaacctgaagaaattgcagaaactgtagaatttttaataagcaaaaaagcaagctatatcactggagaagttttgcgcttaaatggcggttggcttatgtaattttagtaaaaagtggaaaattgaaatagtaatggtaggtgtttaattttgacagaactcggtgataaactgaaacaagctagacgtgaaaaaggactcagtttagacgacttgcaacaaataacgaaaattcaaaaacgttatttaatagcgattgaagaaggaaactatgctgtaatgcctggaaaattttatgcaagggcatttattaaacaatatgcagaagcagttggactagatagtgcgacactttttgatgagtttgaaagcgaggttcctgaaacaccgcaacaagaagtagtaaataatgagccaactcgtgtacaaagtaaaagaaatcctatgcccgctcaatcggtcggcaatcaagctaactctcgtaatcgtttctttgatattttaccaaaaattcttattgctttatttattgtttttattcttttcattgtttggtttttcttgcttaataaacaagataatacctctgaaaaagttaaaactgatacaagcaatccgactgtaaaagtagaagattctactaaaaataaagacacaaacaaagatacagagaaaaaagacacaacatctgatgaaaaaaaagcaacagatacaactgaaaaaccagaagacacagctaaagaagttgaagtaactaaaggtgaaacatctggtaacgaaactagttatacagtaaaaaacactgataaaatgacactttctcttagcgcgactggtgactcttggattggcgtgtcggatgcaaacggaagcaccattaaaaacgtgacgttatccacatccaacccttctaccgaaattgatttaggagataacaaaacagtttctatcgttattggaaactcgcctgttacaactgttaaagtcaatggtaaagagttagaacttgctccaacgcttgttaaacaagtgttaactattaatttagaagcaagtgatactactagtaactcagatgcagaataatttgttttatatggcgaaatctactcattaggtttcgccaacatttttatcattacatactgtttaaatgtaaaaaaggggagaaaaagatgaatttaccaaataaattaacggttatccgtatttttatgataccaatttttgtcgttctatgtgttgtaccatttgactggggaagtgtctcttggcttgattcgaccattccagttacaagtttagtagcaactattattttcatcgtagctgcccttacagactggtttgatgggcatcttgcacgtaaatataatttaattacaaacttcggtaaatttgcggatccaatggcagataaattacttgtagctgcagcatttatcattctagttgaaatgcatattgctccttcttgggtagttattttaatcatcagtcgcgaacttgctgtaacaggtctacgtttacttcttgtagaaggcggcgaagttttagcagctggccaacttgggaaaattaaaacattcacacaaatgattgcaattccacttatgttattaaacaatttcccatttgcttggacaggtatccgtgttgacttaattttcttatatgtatgtgcattctttgcagtatggtctggaatagactatttctacaaaaatcgcggagtatttaaaggttctatgtaataaataaaaaagcataccattgtgtgctttttttcaatacaaaaaaatgaatggagatggattcaaatggcaagcgcagaaattattgcagttggaacagaacttttactaggacaaatcgtgaactctaatgctgcttttatttcagaagaattagcagctaacgggatttatgtctaccatcacactgtcgttggtgacaaccctaaacgtttaaaagatgtgatagacattgctgaaaaacgtagtgatattctcatttttacgggtggattaggtcctacagaagacgatattacgaaacaaattttagcagaacatctacagaaaaacttagtagaagatgcgtttcatatgaacgaaatcacggagtattttgcttcaagaaatagaacaatgacggaaaataacaaattgcaagctgtaattattgaaggatccactgtactaaataatgattatggctttgctgcaggaatgttcttaaaagaaaataatcatacgtacatcttacttccaggcccaccttcagaaatgaaaccgatgttttcgagttatgctgaacctttactcgtaagtgaaaatactgagaaaaatgtgttagagtctaaaataatgcgctttttcggtattggagaatcgcaattagcagcagatttaaacgatatgattttagcgcaagtaaatcctactattgctacatatgcaggtgataatgaagtcgttgtgcggattactgctactgcaaagactaaagaggaagcgagtgcccttgtgaacgaaacggaacaagaaattttacgcagagatggaacttttttatacggttatggcgaagtttctttaccagagttagtaacagccatgctgcttgaaaaaaatatcactatttccgctgctgaaagttttaccgctggattattccaagcagaaattgcccgttttcctggtatttctaaaatttttaaaggtggcatggtcacatacagcgaagagacaaaacaatctattcttgaagtctcacctcaaacaataaaagaaaatggcgtcgtaagttcagaatgtgcgaaagaaatggcgaagaatgtcagcagactttgtaacactgatataggcattagttttaccggtgttgcaggaccagacagtctagaaggacatcccgcaggtactatttggataggcttacatgtagctggttttgaaacagaagcttatcagttcgtttatggtagagatcgaaatcacaatcgccgtcgtgctgtaaaacaaggctttcagttaattaagcaatttttagatacaaataagtaattttcctttatagaaaagaataaaaacagctttataatatacaaataagcgataaaaaagtattagacgaacgcttggaatcccgttataatggggaagaaagcagccggtgcttacacaaaataaaaaatacgaataaatgttcgctttttgcttgcttctcgcttagaaatgcgttatagtaattctaggaaaaacattctgactgtttttttaagagagaagaagcgaaaaaacagctattagaatattatgaaggaggcaacaacgtgaatgatcgtcaagcggcattagaccaagcattaaaacaaattgaaaaacaattcggtaaaggttccattatgaaattaggggaacattcagaccaaaatatatctactatttctagtggctcattagcattagatattgctttaggagttggcggatatccgcggggacgtattattgaagtatacggacctgagagttctggtaaaacaactgttgcactacatgcgattgcagaagtccaagcacaaggtggaacagcagcatttatcgacgccgaacatgctctagatccagcttatgcaaaaaatctaggtgtaaacattgatgagctattactatcgcaaccggatacaggggaacaagctttagaaatcgctgaagcactagttagaagtggcgctgttgatatgttagttattgactctgttgcagctcttgtaccacgcgctgaaattgaaggcgagatgggagatgcccacgttggtttgcaagcacgtttaatgtcccaagctttaagaaaactttcaggtgttattaataaatcaaaaacgattgctatcttcatcaaccaaattcgtgaaaaagttggtgttatgttcgggaatcctgaaatcactcctggtggccgtgcgcttaaattctattctactgtccgtttagaagtaagacgtgctgagcagttgaagcaaggtactgatgtaatgggtaacaaaacaaaaataaaagttgtaaaaaataaagtagctccaccattccgtatcgctgaagtggatattatgtacggagaaggtatttcacgtgaaggtgaacttgttgatatggctgctgaagttgatgtaattaacaagagtggttcttggtattcttataaagaagaacgtatcggacaaggtcgtgaaaatgcaaaacaatatctaaaagaacacacagacattcgagacgaaatctctaaacgcgttcgcgaagaatacgaaattgatggcactaacaaagaacctttagacgaaaatgaagaaacattaagtttgcttgatgatgaataattactagtaaatacgtgatagggaaattacttcctatcacgtattttttgctatttaaaaaaatctcaggaaaataagccgtcatttcattccttttcttgacattgtatgctttgacctataaaattaagttgtatattttatattgctgggagacaagggggaagtttttcctttgaaaatcggcttcaactgaatggggagattagcactcggttgttgatgaaaaatacgcatgtgccagaattctggccaccgacataacaataacgaaaattgaatagcaaaggaggtgtaaggatgacaatcgcaatcacgatcatctccagtttgcttttcttaatcgtcggtctagttgttggttctctaatttttaaatctagtacagagaaaaaactggctgctgcaagggggactgctgaattaattgtagaagatgcaaagaaagaagcagaaactacaaaaaaagaagcattgcttgaagcgaaggaagagaatcataggttacgtactgaaatcgaaaatgaacttcgtgggcgaagaacagagacacagaaagcagaaaatcgcttattgcaaagggaggaaaacctcgaccgtaaagatacttctttaagtaaacgagaagctacacttgaaagaaaagaggagagtatcagtaaacgtcaacaacaaattgaagagaaagaaagcaaactagctgagatgattcaagcggagcagacagaactcgaaagaatttctgcgctcagcaaagaggaagcgaaatctatcatccttaaccaggtagaagaggaattaacacatgatacagcaatcatggtcaaagaatcagaaaaccgggccaaggaagagtcggataaaaaagcaaagaatattctctcactagctatccagcgttgtgcagctgatcatgtggcagaaacaacggtatctgttgttaccttaccaaatgatgagatgaaaggacggattatcggccgtgaaggacgtaatatccgtacgctagaaacgctaacagggattgatttgataattgatgataccccggaagcagttatactttccggatttgatccaattcgacgtgaaatcgctagaatcgccttagaaaaacttgttcaagatggaagaatccatccagctcgaattgaagaaatggtggacaaagcccgtaaagaggtggacgaacacattcgtgaagtcggggaacaagctacatttgaagttggaattcattccatccatcctgatttgataaaaattcttggccgcttgcgttaccgtactagttatggacaaaacgttcttaaccactcactcgaagtttcgaaacttgctggaattctagcaggagagcttggcgaagacgttacgcttgctaaacgggccggactacttcatgatattgggaaagcaattgaccatgaaattgaaggaagtcacgttgaaatcggcgtagaacttgctactaaatacaaagaaaatgatgtggtaatcaatagtattgcttcccatcatggtgatacagaagctacttctgttatcgcggtattggttgcagcagcggatgcactttcagctgcaagaccaggagctcgtagtgaaacgcttgaaaattacattcgtcgtttagaaaaattagaagaaatttctgagtcttacgatggtgtagaaaaatcttatgctatccaagcgggacgtgaagtacgtatcatcgttgaaccagatacaattgatgatctatcttcctaccgacttgctcgtgacataagaaaacgaattgaagaggaattagattatcctggtcatatcaaagtgactgtaattcgtgaaacaagagcagttgaatacgctaaataatatttaaaagatacatcgcaaatttattttgtgatgtatctttttttaatcggttgcctagcttgattaagaacggtataatcaaaggatagatgaaaaaagggaggcggagtttttgggtgagtggaaaattttgccgatgctaaaagaacattattctggtgtagctagagtgcatcaagaaggtatagataccggaaacgctacttttcaagaaaagacgctatcttttgaagcttgggatgagaagtacttaaaaacttgccgcttagtggttttaacggagggtcaagtgattggttgggcagcgttattgccattttcaagtatgcatgcttatcgcggagtagctgaattaagtatttatatagcaaaaagcgctcgaggaaaaggcatcggaaaagctcttatgcaagcaattattcaaacaagtgagcaaaacggcttctggactttgcaatctttaatttttccggaaaatgaagcgagtattatacttcatcatacatacggcttccaaactttatgcatccacgaaaaactcggtgaaatgaatggcgtttttcgagatgtcgcattattagaacgtagaagtaatagaaacggagaataacgaaatgaaattattatttattggtgacgttgttggctcaatcggtcgcgacgccattacagaatatttaccacaattaaagaaaaaatataaacctactgtcacaattataaatggagaaaatgctgcaagtggcagaggaatcacggagaagatttataaggattttctggagcttggtgcaaatgccgtaactctaggtaatcacacatgggataatcgcgatatttttgaatttattgatgacgctaaatatctcgttcgcccagcaaacttcccagatgatacaacacccggaacaggcatggtttttgtaaaaagtaatcaacatgaaattgccgttatcaacatgcaaggccgaactttcttagcagatttagacgatccattccgcaaaatggatgcattaatagaagaagcaaagaaacgaacaaatataatttttgtcgattttcatgctgaaacaactagcgaaaaagaagcaatgggttggtatttagacgggcgagttactgcggtagttggtactcacacacatgtacaaacttctgataaccgtattcttccagaaggtactgcgtatttgactgatacaggtatgacaggaccatatgacgctatccttggaatggaaaaagaagctgttattcgtcgttttaaaacagccttgccaacaagatttgaagtccctaaaacaggtcgagcagttttatctggttgcctaatcaccttagacgaaacaaccgggaaagctcaaaaaattgaccgaattctcatcaatgaagaccacccattttcctttgattaagaatggagatgtaattgtgacagtttcaaaagaagaaatcatgaaaaaagcaacggaacttcgggatgctttacaacaaacagaagaagtatcattctaccgcttagctgaggagagaataaacgctaattcaaaagtagccgcgaaagtttctaaaataaagttactgcaaaaagaagcagtgaacttagaacattatcaaaaattagaagcaatgaaacaaaccgaaagtcaaattgataatgtgcgtgcggatattgattcgcttccaattgtgacagaattcagacgcgctcaagaagacgctaacgatcttttacaatccattacaacggagattactacaaaagtaacaactgagcttgaaaaagaaaattaaccatttaaaactgccaaactactggcagtttttttcttttgaggtcgcgggaaaatgtaactttatgctataatgaaaggatgaaaatgaagtaagggatgatgagataatgacagaatatacaccaatgattaagcaatacttagaaatcaaagacaaatatcaagatgctttcttatttttccgtttaggagatttttatgaaatgttttttgaggatgcactcaatgcttctcaaattttagaaattacattgactggtcgcgaaggtggaacaaaggagaaaatccctatgtgcggagttccttatcattcagcgagcggttacattgatacgttaattgaaaagggatataaagtagctatttgtgagcaagtagaagatcctaaaacaacgaaaggcatggtaaaacgagaagtagtgcagttaatttcacctggaaccgtcatggatgaacgaggattaaaggcgaaagaaaataactatattgcctcactttactgttacgaaggaaaggaatacggttttgcttactctgatttatctactggtgaattaaaatcaacggttattgaagctagcgaagaccgcttaattaatgagttaacaaccctttcaactagagaattaatcgtttccgaatcagaaaaagaagttctttctgacgtgatgaaagaacaacttggtttaactttttcggttcatgaagaagatactatcccagcggaaaacgaaaaattagttacgcgccatatgtcgctctcagaaaaacgagctataggtaaattactccactatttaaaagaaacccaaaagcgggacttaggtcacctgcaacaagcaatacactatgaaactagtaactacatgaaaatggattactattcgaaacgtaatttagaattagcagaatccattcgaggtaaagggcgccaaggaacgctactgtggctattagataatacacaaacggctatgggcggaagaatgctaaaacaatggattgatcgcccgttaattgatcgtaagcaaattattgaacgtcaagatgatgtcagtgaactaatggctcacttttttgagcgtctggaattagtagaaaacctaaaaaacgtttatgacttagaacgtcttgctggtcgagttgcttatggaaatgtaaatgcgcgtgatttaattcaactgcgcaactcgttataccaaatacctcgtatccgagcgacgttattatcaatgaatagtaagagtttaacagcacttgctaatcaattagatccatgtgaagaactaacggaaaaactagaagaagcaattgttgactccgcaccgatttccattcgcgaaggtggaataattaaagatggttacaatagtcaacttgatacgtatcgtgatgcaagtcggaacggaaaaacatggattgcagaattagagcgaaaagagcgcgaactaactggaattaaaacgatgaaggtaggctttaaccgcgtatttggctactatattgaagttacccgggcgaacacgcatctgctcccagaaggccgctatgaacgcaagcaaacactagctaatgcagaacgttatattactccagaactaaaagaaaaagaaaaactcattttagatgcagaagaaaaaagtatggaattagaatatcaactatttacagaagtacgcgaaatggtaaaagactacatagaacgcctccaaaaattagcgaagtctgtaagtgaaatcgattgtttacaaagttttgcagatattagtgagaaaaatcatttcattcgccctaccttaagtgaagacgggtcactgcacgttaaacaaggtcgccatcctgttgtagaaaaagtaatgggtgcgcaaagttatgtcgctaatgattgcgatttagatcaaaatagagaaattttgcttataacgggccccaatatgtcaggtaaaagtacgtatatgcgtcaagttgctctaacagcgatatgtgctcaagtaggatgttttgttcccgccgaagaagcaactctaccaattttcgaccaaatttttactagaattggggcagcagacgatttaatagctggccaaagtacctttatggtagaaatgctagaagctagaaatgctattgtccatgctacaaaagatagtttgattttatttgatgaaatcggtcgtggaactgctacttatgatggtatggcgcttgctcaggcaattatcgagtatattcacgaaaacgttcatgctaaaacactattctccactcattaccatgaattaacagatcttgagaaagaattacgtggattacaaaacatccatgtgagtgctgttgaagagaatgggaaagtggtatttcttcataaaattaaagaaggaccagcagacaaaagttatggtattcatgttgctgaattagcagaactacctaaatccttgattgaacgagcaagccgcattttagagcagttagaaagtaatgataaaaaaataattattacccaagataaacaaccagaagaaattcacgaagaagtacaactatcaatgttcccggtagaaccagaggaaaaagcatcttctaaagaaacaaaactattaaaagaaattgccgccatgaatattatgcagatgacgccaatggatgcgatgaacaaattatacgaactccaaagtaaaattcattaaacagaaaggcgggttttaaatggctaaacatatagtggaattaaccgatgctttatccaataaaatagctgccggagaagtagtagaacgacctgcttctgtcgttaaagaattagtcgaaaatgcgattgatgcagggagcacagtaattgatattttggtggaagaagcgggattaaataagattacaattattgataacggtagtggtattgaggaagaagacgttgcaatagcctttttgcgccatgctacgagtaaaattaaaaacgaagctgatctatttcgtgttcatactttagggtttcgcggagaagcacttcctagtattgcgtctgtatctcatttaacattagaaacttctacaggtgaaacaaaaggaactactatctctcttgaaggcggaaaaatcattgaacaaaaaagtggtcacgcccgaaaaggaacgcaaatcgaagtatcgcaattgttctttaatactccagcaagattaaaatatttaaaaagcttaccaactgaacttggaaatattaccgatattttaaatcgtcttgctttagctcatccagatattagtttccggttttcgcacaatgggaaacctttgcttcaaacaaatggaaatggcgatttacgtcaagtgatcgcagctatttatggcgtgtctatcgctagaaaatcgattccagttaaggcagagtcgcttgattttaaaatttcaggttatgccgtattgccagaagtaaatcgttccaaccgtaattacatttcaacgattattaatggccgttttatcaaaaacttcgcactagtaaaagcgatacaagaagggtaccatacacttttaccaattggtcgttttccaataatcgtgctacaaatcgaaatggacccaattattgtagatgtcaacgttcatccagcaaaacttgaagtacgtttaagtaaagaaaaagaacttggccagctcattagtcagatgattaaagacgcatttcatcagttgcaattaattccagatggagaagtttcaaaaaaacaaaaagaacaacaaaaatccgaacaaattcagatgtcatttgaagaaaacagacagccaaaagaaccgccgacgcttttctcaaaaccaaatattcctgaatacgtaccatctgatgaaatagtaccaaaagaagacgactttattttagaaacgatgcctacttataatccggaaacgcagcctgaacaagtagaagagcaaaaagaacgtattccgaaaatgtatccaatcggacaaatgcatgcgacgtatattttcgctcaaaatgaaaatggtctatatattattgatcagcatgccgcgcaagaacgaattaaatatgaattctatcgtgaaaaaattggagaagtaagtcgagaattgcaagaattactcgtgcctatcgtgttagaattcccatcagatgaatatgtccgactagaagaacaaaaagcgaaactagaagaagttggtgtttttcttgaaaacttcggacaaaacagctttattattcgcgcacatccaacctggttcccaaaagaccaagaagaggaaatgctccgcgaaattatcgatgaagccttgtcagcaccaagtataagtattcataaattaagagaagataccgcgattatgatgagttgtaaaaaatcaattaaagcaaatcactatttaactatgcaagatatggaagcacttcttgatacacttagagaagcaagcgatccattcacttgtcctcatggtcgcccagttattattcaatattcaacttacgaactggaaaaaatgtttaaacgtgtcatgtagaagaggaggaggaatacaattggagttaccattttctggtcaatcaatcatcccagctgcacataatcaaaaagacatggaaaagatattagaacttgatttgacttatatggtgatgctcgagactcatgttgctcagcttaaagctttagtaaaatacgcacaagctggcgggaaaaaagttttgctacatgctgatttagtcaatggtttaaaaaatgatgactatgcaattgactttttatgtaaagaaattcgcccagatggcattatttctacaagaggaaatgcgattatgaaagcaaaacaacataaaatgcttgccattcagcgtttatttatgatagattctagcgcttataacaaaggagtggctttaattcagaaggtccaacctgattgcattgaacttttacccggcatcattccagaacaagtacaaaagatgacccaaaagcttcacattccagtgattgcgggaggattaatcgaaacaacacaacaagtggatcaagtaattgctagtggtgcaattgctgttaccacatcgaataaatatttatggtgaaaagtagctaagtcgtagttgtaaaaacggcttagctattttcatgaaaaacaatgaaaacgctacataaacggtaaaagcattggtgcgcaatagattaagcgttttccaactgttttatacaaatgaatgaaattaaaactgtaccataacaggagtgggtgtttgaagtggtacaggaaatataagaaattaaaattaaaacaaaattagaataatgataaagtggttaaaacgcattaaattagcgttcttggctattttgaaagaaaaagtcacataaaattcataaaaaagtttgaaaaatattgcacaaaactgtagcattttttgtagaatatgttatgataacagtgtagattatttataaattagtttgctcaaaaaagcacgctcgagattgaacaataaatggaggttatatgatgactgaacaatggtatgaattcgcaggtggtaactggcaacaagaagtagatgtacgtgactttatcttaaaaaactatcgcttatatgacggtgacgacacattcttagttggcccaaccgaagcaacaacaaaactttgggatcaagtaatggacttaactaaacaagaacgtgaaaacggtggcgtactagatatggataccaaaatcgtttcaaccattacttcacatgacccaggttacttaaacaaagacttagaaaaagttgtcggtgttcaaactgacgtacctttcaaacgcgctttacaaccattcggtggaatccgtatggcagaagtagcagctgaatcttatggttttaaagtagacgaagaaattagtcatattttttctgaataccgtaaaacacataaccaaggtgtatttgatgcttatactgctgaaatgcgcgcagctcgtaaatcaggcgtaatcactggtcttccagatgcttatggccgtggacgtattattggtgactaccgtcgtgttgcactatacggagttgacttcttaattaaacaaaagaaacaagatttaaacaatacaggtttacgtacaatgagcgatgacgttatccgtcaacgtgaagaacttaacgaacaaattcgtgctcttggcgaattaaaagtactaggcgaaaaacatggtttcgatcttggtcgcccagctaaaactgctcaagaagctttccaatggttataccttggttacctagctgctattaaagaacaaaatggtgctgcaatgagcttaggacgtacatctacattccttgatatttatgtagaacgtgaccttcgcaatggtctaattactgaagaagaagcacaagaaattgttgaccacttcatcatgaaattacgtcttgtaaaatttgctcgtacaccagattacaatgaattattctctggagatccaacttgggttactgaatccatcggtggtattacggaagaaggcgttccacttgtaacgaaaaactcattccgtttcttacacacattagataacttaggaccagctccagaaccaaacttaactgtactttggtccactcatttaccatcaggattcaagaaattctgtgctaaaatgtctatcaaaacatctgctattcaatacgaaaatgacgatgttatgcgccctaaatggggagacgactatgcgatcgcatgttgtgtatccgcaatgcgcgttggtaaacaaatgcaattctttggtgctcgtgccaaccttgctaaaacacttctttatgcaatcaatggtggtgtcgatgaaaaatctaaagcacaagttggacctgcttatcgtccagttgaaggcgacgtattagactacaaagaagtaatggaaaaatatgatgcaatgatggaatggattgcagaactttaccttaatacattaaatgttattcactatatgcatgataaatatgcttacgaacgtatcgaaatggctttacacgatacagaagtattacgtacaatggcaactggtatcgctggactttctgttgcagctgactccttatctgctattaaatatgctactgttcgtccaatccgtgacgaagacggcatcgtggttgattatgaaatcgaaggcgactatcctaaatacggaaacaatgatgaccgtgtagacgaaattgctgtagaacttctaaaaacattcatgactaaagttagaaaacataaaacttaccgtgatgcagttcacacaacttctgttcttacaatcacttctaacgtggtttatggtaagaaaactggtaacacaccagacggacgtcgtgctggcgaaccatttgcaccaggtgcgaacccaatgcatggccgtgatactaaaggtgctttagcttctctatcttccgtagctaaacttccttacgaatatggccaagatggtatttctaacacattctctatcgtaccaaaagctttaggtcgcgaagatgaatcgcaaatcaataacttagttgctatgcttgatggttattccacaaaaatgggacatcacttaaacatcaacgtattcaatcgtgatacattacttgatgcgatggatcatccagaagaatatcctcagctaactatccgtgtttctggatatgcagttaacttcatcaaattaactcgtgaacaacaattagatgttattcaccgtacaatgcacgaatctatgtaatattaaggcgagaacgcttcaacaaggattgctcaccagtagcaatccttgttatttaggaaaggaagaggagaattatgacagaggttttaggaagagttcattcagtagaaacaatgggaacagtggacggtccaggtatccgttttattgtttttatgcaggggtgtttacttcgttgccaattttgtcataatcccgatacttggaagattggtacaggcacagaacgttcggctcaagatgtatttgacgaagcgattaagtataaagagttttgggatgcatcaggtggtggcgttacagttagtggcggtgaaccattacttcaagtagatttcctaattgagtttttcacgctatgtaaagcagcaggagtgcatacaactatcgactcttgtggtggctgtttcactcgcgatcctgagtttatcgagaaattggatcgtttgatggaagtaacagatttaattttacttgatattaaacaaatcaatccagaaaaacatttaaaactaactacgaaatccaacgcaccaattatcgattttgctcactatttacgcgataaagagcaaccaatttggattagacacgtgctaattccaactaaaacagacgacccagaagatttaacaaagctacacgaatttattcaaactcttccaaatgtaaaacaagtggatgtgcttccataccatacgatgggtgtttacaaatggaaggaaatgggcattcgttatccattagaaggtatcgaagctccagaagaagaagtggtagcacttgcaaataaaatcttagaaactagtagttataaatagtgaaaaccggcgaatactatgttcgccggtttttttatagtattttatacatttcctcacaccattttaattcggtttgaatcaaatctaatcgccttgcatagacttgataggacatgttttttagcttgtcttgtttggtttttaaatcaaataatttagcgaaatggtcgagcgtttcttcaattagacctaactgttcttttaagtaagtttctcgttcttgaataagtccttttgttcgagtgttatttaaccaatctagttgaacttttgtggtgaattcatctcttgttacagggattttaagtggagtttctgaccattcaagtagggaatctaagccagattgtgtaatagtgtagacctttttatcgggctttttattctgtgaatgtttatgaactactaaaaatcctgccttttctaacttagataatgaagggtagatttggctgtgatgtgtattttgcaagattctaagtcgatttgctagctcgtagccactcgatgcttcacgagctatcatttgtaataaagtatattctaatacattgggtatcataaagtagcacctctaaatttctatttaaccttattgtaagcgataaacatcaataagtaaaatcgttagatatgtaataaattatatatgtaaatattgacattggtatttatcaagcgtaatataatagttgagttttattttggaaagggaagtgtagttgtattatgatgacagacaaggaaatgaacacggggaaatggataactgcagcagctagtttgcttgcttttatggggattggagttgtggatccacttttaccttctattgcagaaagtattggcgcatcccattcacaagtagaaatgttattcactgcttatatttttacaatggcgattatgatgattccaattggtattgtcgcaggtaaattgggtgacaaaaaattaatcgttatcggactatttatcgtaactatttttgcattattatgtggtttatcagatacaattggcgctttatccatttttcgtgctggctggggctttggtaattcaatgttcatggctacagcgatgacaatgttaattgctttatcagagacaccaggacatgcgattgggatttatgaagcttctatgggccttgggatggcatttggacctttattaggaggtattttaggaaatgtttcgtggcgctatccattttttgctacagcttgcttaatttttatcgcatttttactgattttatttaaagtaaaagaaccgaaaaaagttgttcaagcgcctactgaaaaaaatgaagtggctatcaaacagatgttacatttgtttaaatatcgcccatttttacaaattgcatttagtggcatgttttattattattgtttcttcacaattttagcttattcaccactcgttcttggtttatcagcgattcaaatcggttttgtattttttgcttggggactatgtttagctcttggttctgcgaaagtttctcatgcattagaatttcgttttaatagtaaacaaatattaaagggatcgttacttgcgtgtgctgttatcttagcattactaggatttattgataatacagccgttgatattggtttaatagttatttcaggcttaatattaggcataaacaacgccttgtttacaacaactgtcatggagcactcgccatatgcaagaagcgtcactagtggggcatataactttgtacgttggctaggggcagcatttgcaccactttgttccggcttactcagtgaagcatttggtatgaaaatgccatttatagtagccagtgtcatttgtttagctggtatgggacttctctttattaaactaaaaccggcacatttcgcacttcaacaatctacttcaataaaaagtgaataaaaacgacaggctgagcaattttgttcagtctttttttatgctaattattaattatttaatgtttatcgttaaaaatctgttgacacactatctctctattatgtataatctagaaaaagggggagacttacatgaaactaaaacgattgcaaaaaatgagttattttctacatattacccttaagattttatcgattagttctgtcataatggctataattgccgttttaatgaagctttttagtagcaaaaatgttatgataaataaactagaatctgatactatattttattttcaaacggaactttttgttggggagaataatctgtcatatgttgaaagggaggaatggattttagttggtgttgccgttttttctagtatgatacttgcctatttattatggacagcaagtatgatttttaaagatttagctgctaattttacgccttttaatgatattactgttagtagattacgtagaatcgctgtcttaatgcttatttatgcactagtaccgcaaattgtttattctattttacataccgtatttatacctggttatagcattaattttggactaaatatgtcatttttctttgcacttattttttattgtttaacagaaatatttcgttatggcgcatctttgcaaaaagaatccgacgaaactttatgattggagcgaaaaacaatggcaattgtattgaggctggatcgaataatggccgaccgtaaaatatcgttaaaccagctgtcccaagaagttggtgtagcaaatgtaaacttatccaaaataaaaactggtaaagtaagcgccattcgattttctactctaaacgaaatatgtagagtcttaaactgccaaccaggtgatattttggagtatgtagcggatgattctcttgaaaccgaactttaaatgcgttagattagccatacttagataaggagtgtttaaatgaacaaacaaaatgaattgcaatctgtattatctaacaagaaaaaagtgttaataattggtcctaacggtgctggtaagtcaacttttgctgcaaaacttggaaaatgttatgattttgaagtctgtcatttagataagcttttttggttggagaattggaatgcagttgaaaaagcggatttcgaggataaagtgaacggaattctgcgttctgaaaaaaagtatattatagatggtgattatttctttaatttggagaaaagactcgaacatgcagatttagttatttggataaaaattccattgtttctgtgtgtagcaaatatagttaaaagaagatttaaatacatgacaaatgcgcgaccagatgtaactgaaggctgtgacgaaaaattaaatttatcatttttactgtatgctttaaagtataataaacgttctggaaaacaaacgaaagaattattggataatgtgtatgataaagagctgtttgtaattgatagttataagaaattgaagagttattgctgataaatagccaatgaatgcttgggataagtgtttattggttgtttgcgataatatgtattacttcctataatatatattatgtaaactagaaagctgaggagtaaattatgagagaaatgctgtcctctcttgatttatacatctaattatataagaaatgcttattatacatatgaattgttattatatatatgtaataagcattttcttataaatacatgggaaaatagatcaaactattaattaaaattatgttgatacaggaattcaatcttcgaaattattgaattagtgttactaaaatcacagtcaaaaaatcctatttttctctcatttaaaattaaatcaagtagtagactttatactttcattaagttctgcccattcattatctgaaaagctagaaaaatccaagccaataatctcactatcttcattcagaaataaagatacatggctagacatttttacaatagaatccaccttctcttcatccagtttaaaatatatttttttgttccctctaaatattttaaacccagattctttagttataatcgaattttcttcaaaaatatctatttggatcactgggtttttttctgtatactcttcaatagttaaattagaatcttcaatattattgattgatgtgaaaactacttctacaactttccgtgtaacagaattgattttaatttcaacaaatgattcatgttcgttaacaaatctataataataaaattctcctagtccatatttatcatcattttcagaaaatgatacagtaactggaacataatagtctacttctacttcatctttaactattttatcttcataatctttaattttcataatttgctcctttcatagtcaaggtagatatacagcatgtttaataactggtaattgtcctgcttctctagccggactaaatattaattcccaattatctatgactattttagtattaaactttatcacattagaggtagctttttctacagcaccttgaaaactccttaacaattgttgctcggtaagtttttgtccatgagataaatttcgagttgagtattctaccatatgtttggttccattgggattcacccataacttctctccattaacatttatttcaaacgatttaggaatagtagttccttctcttggaggttgtgaacccttaatgtcatcccagactgtacctgcagaaccgctagcactcttcttcctcaccaaatctttaagtttaggaattgcaagccttttcccatggtaagctccagctgtgtatgtaaaggtgatgccagctatgatacttattccttgcaacaagcttatttcttgtccggttagtggatcccttctagcttttacggattgtatgattccttttaataacttggcatcttctattccttggttaggctctggtggtaattctccgctaagcacagcggcattgtacgcgttcgttgcttcaacatctactataccatttttcattaacacccacatttgaccacggtacgttttttgatattcatcaaaattgaatgttgtttcgttgctttttagcgcttttcctaaggctttttgcatccgggttacggtggtaaaattcagcttgctcatatcataggtgccggttttactgttaaattgaatgttcgactggagttcgcgaatagtctgctgaattcctcggactaaatcggttaaattatcaaaaaaaccgccatggctttgttcaaaagccaagtatttttctaaaatattttcttgtttgtaggcgatactcagctgggaacgatagctctgcatctgtccttccgttccagtattcatctgctgggctaatgctttttttttcgcttcgatgcgatcaatcattttcccgagttcgtataaaccgtccgcatcaattttcgcatccgcagaaccatccacttgggcgtgaaaatcagctatatactgtgctaatcgttcttcgctttcgttcatggcttcgattatcgcatcacataatgggaaataggtcatttggtaataatttttcgatgcatcaactgcttttccttttaaactgccgtcttcggtataatttttcacggcagttttgatgtctttgatactctttcttgctgcttcattggctgtatgtagttggtacgcaaaggtttgtatttctccgatgtcaattcggctcactgtaacaactccttttgtaaatcttgttgtctcatatcaatatgtttgatttatcacaattttattgtagcagtttatattaaaaatttgtactctcttacacttaaaattcactatttcttttgaatttctctccacgatactttcttacatttaaaacttgccatttcatcatcaacgttccaatgaaagttaccgtttttatagtaaagatttgcttcttggatttctgacgacgtgtttaaatcgttatgtatgcataaatgagtaacgccttctaaacaaaattctagggtcgttaatgaatctgcttgtctttgaataatcaatttaactactggattcgtgcccatcaccattgataagtcagtttcgtctacatatgtgctacttgagtaagttaaaccagtaatgcaactatcatgaaaataatttaatgagtccattaattttacaatatcggtttcgttttttatttgtttccattccattaagctaattctcctttatgtataatccattttcattgtaccatcacttatttaaacaaaaaaagccttaatccacaactgtgattaaggctagtttaatcttatttcgctatttttcttgaaatgttgttgattgattttagctttttatgaagattaaatgatactacttatactctttcaatgataattgcaataccaataccgccgccaatacataaggaagctacacctgtatgtttatcttcgtgttgtaactcatttaacaatgaaacaacaatgcgagctcctgaagcaccgattggatggcctagcgctattgctccaccataaatattaagtttctcttcaggtatttttaaatctcttgcaactgcaactgattgagatgcaaaagcttcatttaaatggaataaatcaatatcagctattgagtagcctgctttttctagcgcttcattaactgcatagtatggcgcataacccatataagctggatccactccgacttctgaagttactttaattgtagctaaataagggatgttttctgccacagctttttctttggacattaaaatgattgcagaagccccgtcattgataccagaagcattacctgcagtaacagttccaccttcttgaaaaacactcttaagcgtagcaagtttttctaaagtagaattagcgcgaattgtttcgtcagcttcaaaaaatgaaccatctggaagttgaacaggaactatttcctcttcaaaaaggtttttttcttgcgcacgagcagctttcatttgcgaattatgggcaaatttatcttggtcttctcttgaaacggaatatttttctgccacattttctgcagtaattcccatgtggtattccccgtatacatctgtaagtccatcaataatcatgctattttttaaatctttcgggttgatttcttcaccagctagttccgggttaagtaataacggcgcttgggacatattttcggtccctcctactgctacaatgtcagcctcccctagttgaattgcttgtctaccaagcatgatagcttttaaaccagagccacaaacttcattaattgtcacacctggtactttataaggaatcccggctttaatagcgacttgtcttgctacgttttgaccgagacctgcttgtaaaacattgccaaaaataacttgatccacacgttctggagcaatgttagctctttttaaaacaccttttaaagcggtagcaccaaggtctactgcactgatgtctttcaaactaccaccaaattttccaattggtgttctaacggcatctattataactacttctttcatagcaatctcctttaaatgtaatctacccgtattatatcatgaaacttgctaaaaactcactagattaagcccaatgtattgtattttccgcatttttctactaaaattgaagtacttacaaataaaatataaaggacttgagcttacatatgaaaattggaattgataaaataggtttttatactcctgcgttttatgttgatatgactgaacttgctgaagctagaaacattgatccaaataaatttaccattggaattggccaagataaaatggcttttgcccctatcacccaagattccgtaacaatgggtgcaaatgcagctttacaaattttagatgaagaagatctagaaaaaattgatttggttattttagcaactgaatctggaattgatgagtcaaaagctggtgcggtttatattcaccgtttgcttgggattcaacctttctctcgtgctattgagataaaagaagcttgttacggtgctactgcgggcattaacctagcgaaagattatgtcgcaaaacatcctgatagtaaagtacttgtgattggctctgatattgcgcgttatggccttgaaactggtggagaagcaacacaaggtgctggagcagttgcaatggttatttcagctaatccgcgctgtattacgcttttagatgataacgtattctatacagaagatattatggacttttggcgccctgtgtattctgaatacgcttgtgtagaaggtaaatattcaacagaacaatatattcactttttccaaacgatttggaataaatattcagagaaatttggtaagaaactagatgattttgcggcaatttgtttccatttaccatatacaaaaatgggtaaaaaggcattagatacaattattgaaacggctccaagtgatgtacaagaaagattattagaaaattatcgtttaagtacactttacagccgcaatgttggtaatatttacactggttcgttatatttaagcttcatttccctgctggacaatcaagcgaatctacaggcagatgataaaattggcttctttagttatgggtctggggctgttggagagtttttccatggagagcttcaaccagactataaacaatatattcgtaaagaggctcatgctgaattattagctaaccgtacgaagctatctattccggactatgaaactaaatttaaagaacaattaccaaaagatggttctacgcttgaaatcgatcctgctagcgatccagcgccaattattttaacaggaatacaagatcataaacgtcaatatataaaaaaataacgatcaaaaaaaccgactaggctcatttagctagtcggttttactttgaatcgtttaaattttcttggggacaaaaaacggataagaatgtatcctagcataatgccacaaacatttaagaatacatctccagtatcaaagaaccccacatgcattatatactgcatcccttctactgcaaaaatcaacattcctgctgaaagtaatgcagtaaaaaatcctaatttctttaataaaaaaccaattggaacaaaagcgagtacatttcctacaatgataacacgcaagtttccagccaagaatgtatcaataaaaccaaaagtatcactcgaaaatccttgagtatcggaagcttttccgaataataaacaaacaagaatactgaaataaattatatagcaaaaaacgagtaatgctttatttattttccagtttactaattgaactgcgacaaaatagagtaaaatcgccgttatgccaaccgtaatgtagcccatatgacttactgtcgccattacgtgctttaaataaaaataaagccatccttggaaccaggaaaaatacatagttactgcagcaattaaagaaatgattggtaaaacaagaattatgaagtattttttcatcctggtgtcctccttttcaaatcttacatctagcttaacacttgaaaataaggactttcttaaaaggatttaaagattttctaagtttttctcttttacaaataaaaataaaatgccgccaacgaggaaaagaacaattaagctagctaccccgtactgtgtctttccggtaatttgcgtgattacgcccatcagtgccggacccataattgctgaaaatttaccgaaaatattataaaaaccataaaattcattagaacgtttcttaggaatgattttcccgaaaaaggatctacttaatgcttgaatccctccttgtgaagttccaactaacatggctaaaatccaaaaatcaactgctgttttcataaatacagcataaatacaaataataatataaacaaaaattgcagtaaagataagcggtttggcactaaaacgtttagctaaatagccatataacaacgtaaaaggaaaggccacgagttgcgtcattaagagaattaaaatcaatgtcgtttgcgaaattcctaagtcaattccataagaagtcgccatccggaaaatcgtatccaccccatctatatagaaaaaatacgcaattaagaagatgacaatatttttatgttcactaatgtgactcactgtatgaaataacctcttaaaacttgttctgactggttttttcaccgctggaatataatggatttgatgtacatttttccacatcggaatcgtaaaaaacagccaccataatgcagtcataacaaaaccaatatttactaaagccacatcactaataggtaaaattcctgtcgcttgaaaaataatgaaaataataaacggaatacaactacccaaataaccataagcataccctgcagaagacaccttatccattctgtcattggtagttacatcaattaaaaatgcatcataaaaaatatttgcccctgaaaaaccgattaacgataacacataaaatccaagtaacaaaagccaggcatccgtagggataaaaataagtaagaaagtaaaagcaatccctattgctgtaaaaatgccgaaaaatcgtttcttaaaaaattgataatctgctattgtgccgaggattggtgcgagtaatgaaattaacaaagttccaatggagttcgcataaccccagtaagcagttgatgttgtatcagcaattcctgcatttgctgccacccctttaaaataaatcggtaaaatggcagttgtaatcataatagaataggcagaattcgcccaatcttgaaaaatccagcttttttcctcttttgtatatgccaaaagtatttcccctcttttctattcgaatagcgcttctattacagtaccagcagtatttggaaattgtaagcctaaaattcgggcaaaagttggagcttcatcaactaaatgtgcatttgcaatttttttgcctttttttatgccaggtccgttaaaaataatcgttgttttgtaatccggtttacttggagaatagccatgaactgctttgtaataacctggttttccaagcatctcctcagtcactttttcgtaaagcggaccatctatgtcatccataaagtagtaaccactcttcccttctaccataaaagtagcctggctgtcagcacctcgacgtgttaattcctcagttgacaaaatttcttctatttcgtggatgctttgcagtaaaacctcgatttcttggttatgtttttcatttttcgtataaatataacaagagccatcacagcttttggcatatacttcccagtctgtaatcttgccatctactactgttagccagcctttttcagcaaagagaacatttaagcggattgcgtgcgttacatctatttgataatgatcacccaaaatagcgaaaactgtattttcataaataccagcatctttcgtggcctgaataatttcagctaaacggttgtcatgtctttttaaagcggcttttgcttctgttgaatgaactccgtgggcatgacgcatactatccatatctactaagtgtgttaaaagtaaggttggttttttggcttttattgtatctacaacactcgctgtcaaaaatatatcaagctctggctgatttatgccttttcgtaaatgtccaaattttcggtccatatcgattaaaaataatggtgaactagcatgaagcgacaccatcatttgcgttaaccaaaagcgatttgggaaaatttccgcaatattataatcaatactactttttgctgcaactggccataaaaaagctgcggttgtcatccctttttcttttgctaaatcatataaagtgggaacttgaatcgcttttttataccaaaaccagtctggtgaatctttctcgggttgaatttttgtgttatttataatgccgtgagttttcggataatgaccagtaataatactcgtatgtgctggatatgtaagtgatggatagatcgtttctacttcttgaatatgtgtccccgtttggattaattctcgtaaaactggtaaatcagacgtgtcctttaaatcaagtgctcctagcgcatctaatgaaatcacaaaaagatgttgtttcattatgctttccccctttaaaaaacaggggttttccagctaatctggaagaacccccgtgtgcattacgtatgactgattgtatcttttggttggttaacttcttcttgattcgtgacgcctagaacatccaagaagaacattacaactggaataccaacgattaatccccaaattccaaagaaatgctccccgaaaataagaataatgaaagtataaaaaactggtaaatttgtttttgctgacataagttttggattaagtacataagattcaagtgcatggataatgatgacaactactaaaatatagaaaatgtattctacgccaccgattgaataaccaatgatagtcagcgggataagagaaataataaccccggctactggaattaatccaagtaagaacaccattatcgataaagtcatcaattgcgggaaacctaaaatccagagcgctatcgtcgtaagtacagcattaacaagagcgatgataaactgtgcttcgattactttcccaaaagtagccacaaactttgaaccaaagaattttacttcttcgtatataaagcctatcttactagtggaaaattgattggtaaacgaaatcaaatgatcttttcctaatgagaaaaacaaacttagcataagtgcgataaatacgttcatcaacactgtcccaacgttagtcaaataagttagaatcattgaaacgccttgttctgtgtatttcataatatcaaattgatttgctagactaacaatgtagttaataaactcattattactatctgtttttaagaagctattaccaaatttcactaattgatttatttgatccgctaaaacaggaatatatttaacgaaaacgaagacaatcacgcctgcaattaaaacgtaaagcaacaacacaataatttgtcgataaattgaaattcgtcgtaaaataaagttttctagtcgagtaataaggtaagaaaaaatgaatgttaataaaataatattcatttggcttctaagcaagtaaagtacgaaggcaattagtagaaataccccaacgcgtcgtacgcttcgattctgtaaaaataaattaaactctttcaaaaataaataacctcctacttaatttggctatttgtcctcgccaataattttaacttctgtttctaattcaacatcaaatttttcacgcaccgtttgttgtacatgagcaattaaattcatataatcagtagcagtcgcgccgccaatattaacaataaaaccagcatgttttagtgaaacttgagcgccgccaataatatggccttgtaagccgctatcttgaattaatttaccagcaaaatggcctggtggacgtttaaatacactcccacaagatggatattctaaaggttgttttgcttctcttagagcggtaagttcatccattttcgcttggataatgttcttgtcttctaattccagtgaaaaagttgcgtctaaaacaatatattttttttcagcaatcgtactaaaacgataagctgcttttagctcagaacgctttaatttctttaattcgccggactgtgtcaaaacagtagctgcttcaaggacatcgctaatttcgcctccataagcgcctgcattcatatgtaacgcaccgccaatcgaacctggaatgccgcacgcaaattccagtccgcttaaactttcatctaatgcaaattttgctgtatcaattaacttagctccactcattgcgatgatttgtgtgttttttctttcaatggattgaagtaagtctaagtgtacgattactccgcgaataccaccatctttaataattaagttagagccatttccaagaattgtaagtggtaatttgttttgatgacaataagtaacgatttccttcgtttcttctattgttttcggcataacgaaaacatctgcatttccacctgttttcgtatacgtatatttagataagggttcatttaatttaatagctatatgaggaaattgtgcttgcaagttgttcattatttatttcaaacctttcattgatgtaattttgaaaaatcacttcctttattttatcatggaacctcacttttacaaagaattccatagtttttttatcaaaataggaatagatagtaataatttagggtaattggatgatatgttcttgagaattaaaatcagaaatgatatgatatagaacatacattcgattaaattaagaaagggatgaaaaaatgattcgttttgataatgtatccaaaaagtacagcgatgataagacagcagtgaataatgttactttggacataaaagacggcgagttctttgttttcatcggacctagtggttgcgggaaaacgacaacgttaaaaatgattaatcgcttgattccacttacaactggaaccatttatattaatgaaaagcgtattagtgattatgatattcatgaactccgctgggatattggctatgtcttacagcaaatagcactttttcctcacatgacaattgaagaaaatatcgctattgttccagagttaaagaaatggagtaaagaaaaaatccatgatcgaattaccgaattgcttgatagcgttggtttagatgcggaaagttatcgccatcgtaagccagctgaattatctggcggagagcagcagcgtgttggtgttgttcgcgcacttgcggccgatccaggaataattttaatggatgagccttttagcgcgcttgatcctatttcacgccaacgtttacaacaagacatttccacacttcaaaagaaaatcaagaaaacaatcgtatttgttacccatgatatgcaagaagctctagcactgggagaccgtatttgtgtcatgcaagatggcgaaattgtccaagtcgctactccacaagaaattgtaaaaaatcctgaaaatgattttgttaaagatttcttagcttctggtcacgcgttcaatacaccgattttagaatcgagttttacagtaaatgatttaatagaggctgatttgttttacgcctatcaagctagtgacgggacgatgggaatttcctcgaacgaacgagttgaaaatctagttcgccgcattgccgaagaacaatcggttccagttaaagatgaaaccggtcagtttatcggtacgattactaataaacatgtgatgcaatttttagcgcgtcatcttgaaagttcgggtgagcttgtatgaatacattactagatacatttgctgtccgtaaagatgagctattcacggccttagtacaacacattcagatttcgttcgtatccctttttattgctgtactcattgctttgcctctaggtatctacttaactagacataaacgacttgctgaaccaattattcaagtagctgctatttttcaaacaatcccctcccttgctttacttgggttattaattccacttgtcggtattgggatagttccagcaattattgcgcttgtaatctacgccctgttgcctattttacggaatacatatactgggataaaagaagttgacccagctcttgtcgaagcttcacgcgcaatgggaatgaacaaatggaaaagattatacaaagtacaactacctcttgcaatgcctgtaattatggctggtatccgtacggctatggtattaattatcggtacggcgacacttgctgcattaattggcgctggtggtcttggggacttgattttacttggtattgatcgcaatgataatagtttaatcctgcttggtgcaattccagcagcattactcgcaatcttgtttgactttctactgcgatttcttgaaaaagcatcctttaaaagtacgattattacgatttcagcaggaattttactcactgccgcaatcattgtcgttccttattttgcttctgataaaaaagaaattacaattgccggtaaattaggcgcagaaccagaaattttgattaatatgtacaaattagttattgaagatgagacggatttaaaagttaatgtgaaacctaatatgggtaaaacaagctttgtctttaatgctttaaaatcaggtgatatagatatttatcctgaatttacaggtaccgtattagaaactttcttaaaagaaaacgcaaaaacgcatgatccagaaaaagtttacacgcaagcacgtgatggtttagcaaaagattttgatatgacatacttaaaaccaatggaatacaataacacttatgcgcttgctgtttcacctgaatttgctaaagaaaacaaattagagaaaatatctgatttaaatccagtagctgatcaggttaaagcaggatttacactagagtttaaagatcgttcggacggatataaaggcattcaggataaatatgggcttaccttccagaacttgaaaacaatggaaccaaaacttcgctacaatgcaattaaatctggtgacattaacctgttggacgcttattcgactgatagtgaactcgctcagtacaaactaaaagtgctagaagatgatgaacaactcttccctccttatcaaggtgcacctcttatgctgacgaaaacattagataaatatccagaactaaaaaaaccattaaacaaacttgcagggaaaattacagacgatgaaatgcgtaaaatgaactatgaagtgaatgtaaatggtaaatcagcttatacagtagctaaagattatctacaagatcaaggaattattaaatagaaaaaagctaggtggtttttacgccacttagcttttttgttattgtctgattaaatttttcactttattaatattaggtttatagaaacgacaatgtgtttcgaactctttattaaattcagcagcacgttgggttaaggactgctcatgatcaagcattaagccttcttcaagaagaggtctaagcgaaataatttgatcaaatacaagtccagcattcgtgtcacttagaacagatacgatttttcctaatgctttttgtttttcagttggtaattctttttgatggagatggaaccattttgctaattgtttccgattctttcgtgttgcttctaaatagatactttgcgcatatgcagctttggtaaacgcaatggaaagattttcagctgattcccagtcttcttctaaaatttcaccttgcattttaattttttggttgagcaaagtaatatcttcttgataaacgtctaatttgcgttgttgttgtttataaacttccatcgctaaattaagttcatcaatcgttggctgcatttgttcaccaaaaatagtattatcatttagaattaattgtgtttgttctatcttttcagcaataatactatcgcgttccttaattacatgagcacgtttacccaagtattcaaaatagaaattatacttttgaatgcgattaactactgcttctgcttctttcattgttgctggttcgtcttttgagtttactacagtgactccagctactttgtttaattttgtataaataatgattgtgaaaacttcgccgtccagtttgattgtgtacggtagtttatgttgctgttctaaaagccttttatgttgttttaatagtttatccgtcatcgttaatcaacacctttactacgccattagtattatataattcaattatatagcataaagatgaaaatttcgagggaaagaaatgagaaaattatttttaattgtttacataatataattatcgtaatcttctctttttataatgaagttaaagtgtaaaataataagtagatatttaagaatgcgataaaaattgcaacagaccaagacactatttttaaccatggtgagttaacgaattcgcccatcttctgtttatcacttgtgaacataactaagggaataacagcgaaagatagttgcatggagagtattacttggctgaaaataagcaactcatttattccatttgctccataaagtgctgtaataataactgctggaacaattgctagtacacgggttaataagcggcgtactactggttttagacggatatttaagaaaccttccataacgatttgaccagctaatgtgcctgttaatgtcgaattttgaccagaagcaagtaaagctaccgcaaacaccgtactggcgatgctacttccaagtgttgggttaagtaatttataggcatcttcaattccagctacgttatgttgtccagtagtataaaaggcagcagcagctaaaattaaaatagatgcattaattaataacgcaatagttaaagagaacgttgaatcgataaatgaaaaacgaatcgcttctctcttcccttcttttgttcgcgcgtattgtcttgtttgcacgatcgatgagtgtaaatataaattatgcggcataactgttgcaccaagaatcccgagtgcgatataaagcattgccgggttcgtaacgatttctgattgcgggataaaacctttcgcaatagcttgcatatctgggtgtgacatgaccatttcagctccaaaacatacaagaatcgtcaccattaaggtaataacaataacttctatatagcggaaacctttatgttgtaaaaataatacaagaaaaatatctaatgctgttatacaaacgccccaaatcaaaggaatgccaaagagtaaattaagtgcaatcgcactaccgataacttcagcaatatcagttgcaataatggctaattcagctaaaatccataggacaaagccaaacggtttggaaaaatgatcgcttgatgcttgagctaaatcgcgcccagtcacgatacctaattttgatgcaagtgattgtagtaaaacggctaaaatattagaaattaaaataacagataataaggtgtaaccaaactccgaacccccggcaatggatgtcgcccagtttccaggatcaacatagccaactgcaataagagcacctggtcccataaatgcaaataatttccggaagaactttgcgttttttggaattgctactgaattatttacttcgcttaagctgggagcattctgtgcttttctccagctttgttttgtgcgttctgttttttcctttttcatgctccctgaccttctttcgtttatgataaaaagtttactacgggaaacattctttgtcaaacgaaaaacacaacctttttatgaagctggtaggttgtgttttcgattgtttttataagacttcggttaatgtttttcttttgtttttaactggatttaaagtacgttcgacccatccaagaagtacatcggctaatattgccatgactgctgttgggatggctccagctaaaataattgcggttccgttagttgcgttggttccgcggactataatatcaccgaggccgcctgctccaacgaatgtcccgatagctgcaacaccaattgcaataactagcgcatttcgaatacctgccataatgaccgataaagcaagtggcatttcgattagacgaagcacttgccatttcgtcatgcccatcgctttacccgattcaagaagtgccccatcaacgtttctaatgcccgtataggtattttttagaattgggagtaaagaatataggaacaaggataaaacgactgtattcgtccctaagcccataattagcataagtacagctaacattgcgagcgctgggatagtttgaatgatattggcaatttggataacccatccagctaagcgtttcttcctagcaatatatactccaagtggtatcgctatgattgcggcgaagataactccgtacgcactcattaagaaatgccgccagaactcttccatgacataacttccatttgtttggtaataatcaattaattgttttaatgtgtccatcttttggcacctccttagtttttaccttcaaagtaattatttttttgcaagaattcttgcgctacgatggatggttcttttaatttgccatctgcttcataattaagcttttgcatttcttctgttgagattttaccttttaacttattgatagtagtttttaattctggatgtttctttaaaatttcatctgttgctagagctgaagcatcgtatggtgggaagaattttttatcatcttttagtaatttcaagttatatgttgggatacggccgtctgttgaataaccaagtgccacatccatttgattgtttttaagtgcggtataaattaagccgatttgcattgggaaaattttcttgaactcgatgtcataagcttttgaaaatgctttataaccatctccttcacgttccatccaagaattatcgaccccagcagtaagctcattttctactttacgcatgtcgctaactgtagttaagttgtattttttagcagtatcttggcgtaccataaacacatacgtattagcaaagccataagaatcaaaccatgtttggtggaaacgctcttcaaatcctttttttactgctgctaaagctttttcaggatctttaatagcatcttctccaagaggcccaactaagtctgttccggtatatcttgtcgctgtaatatccacatcaccatttaacatggcttggtgctgaacgatagttgatccgaggttatttacaatttctacttttaggccagtgtcatgttcgattaattcttttaaaatattggaaacgatttgtgattctgtcgtggccattgctccaatgcgtattgtatctttagaactgcctccaagtcctggtaaagagcaactagataagaaaagagaactagttagtagtaatacgctgaatagcgcgataaattttttcttcatgttattctcccccttcctgagcttcacggatggcttttggagttaaacgatactctaattttccaagcgcgaattctactacaagggctaaaatagttactgggattgctccgccaagaattaaatctggacgatataagtttaagccattaaaaataaagtctccaagtccaccagctccaatatatgaagcaagcgttgcccaagcgataacgtacacagctgataaacggataccagccataattactgatatagagttagggatttcgacattaatgattaattgccaattcgtcatgcccataccacgaccagattcgattaaatttttatcgactcctcgaactccaataaaagtattacgcaggattggtaaaagtgcgtaaataaacagtgcaataatcgctggtaatgtaccgaccccaagaaacgggataataaatgctaaaatagcgagtgaaggaaccgtttgaagaacactaaccacgccaataacaaaatttgctacttttggtgaacgcgtcagtaaaattccaacaggaacggcaactgcaatccctaaaattacagcagataaggagatgaaaagatgttgccatgtttgaacaagcaagttatggccgttttcttgaaaaaaagtaacaattgcgtccatagcttatccctcctgcttcatttctggttctgtcgtttcggaatccgcttgttcctcctgattttctgccacattatctatcgttccccaaatggaatcataaacaatatctactaaactggcacgagttacaatcccaacaaggcgtttgtccttgtcaactacaggaatatatttataaccacgttttagaatccgttgtacagtatcacggagtaaggtatcttcatacacgtaaaatacatttttctcgataatatccatcacagaagttgctgtgcggcgatttaaatcgatttgctctacgtcgataaatccttttaacacattaccttcatccactacaagtaacgtatctactcgtttttctttcatgactgtaatggcagcttgtagagatttatctgctgtaatagacactggattcgtgttcataatttgtgctacttgtgtaacatcaggttttgcctcaattagacggtctttaccaatgaaatcttctacaaatgaatttgccgggttacgtagaatttcatctggtgtatcaaactgaacgatttcgccagctttcataataacgatacggtctgcgagtttaatcgcttcatccatatcgtgggtaacgaaaataattgtttttccaagttctttttgtaaattcttgaattcttcttgtagagaatcccgagtaattggatccagtgctccgaatggttcatccattagaattaaattttgttctgctgcaagcgctcgcaaaacaccgatacgttgttgttgtccaccacttaattcataaggatagcggtctaaaaactcttctggcaaatcaactaatttaattaattctttcgcccgttcttgttttttctcttcggaccatttaagtaattttggtacaaggacgatattctctctaatcgtcatatgtggcatcaagccaatttgctgaataacataaccaatagaacgtcttagtttgacgggatcttccgccatgatgtctttatcattaataaatatttttccttctgtaggttcaataagccggttaatcatcttcattgtcgtcgttttcccacaaccacttggaccgataaaacaaacaaattctcctttatcgatgttaagtgttagatcattaacagcttttttgccccctttataagtcttcgttacgtgttcgaattttaacacgcttatacacctccattttttctttaccactaccaaaaaaattggcaatcgataaatcttttccctaactagtaatgatttaaactttttaaatacaaaaaaacagcttaaagacagtgtggcattcaaacggaagttactaaacaagatgatttcgtacttgtggcacgtaaagaacatcgctgctaaacttataatcgtaaaaatggacattgtgacaagctgtaatacagtatttattctattataacatactaaaaagccctattagcatttactaacagggctttcctttatttaggtaagaataatttaggcgttgttttgagtagtatcgagataactattccacaaacaacgacggttccgaggcagctagctccgttcatcactgctgaaaatagttgtgctccccaaccttgaaaagcataagcgccccaaaataaaacgccagctacataatgccagaaatatctagccacaccaccaataatcatggttccccacgcccactcgatggctttttttagttggttagcagctaaattacttcgaacttgtttactaaatactccgctgaaagcaataaaactgaaggccaggatatattcaataattgcctgagatggcattaaaatataagctttccctgttaaaaaatgtagtaacccccataaaagcccagcaaatccagccgcccaaaaaccgcgacgaattgcaataacgtacattggaatcattcctagtgaaatcgaaaaactggaaccaatgtccagcgggataaagcttagtaccatcgcaactgcagcaaagatagcacattcaagtaaaataattaatcgtttgttttgcataaaaaataaactcccctcttctttttggtcaaaaacgtaccccagaagaaagcagtttctattgttagaaatgcaatcgccacaatccctacgctcgtattaacgaacaggttcaaagggtcagaatccaaaaacacgcggattcaatctcagctaagaagccccccctgtggtaacgtctatgaaattatcgtacaacaatcattatagcatgagatgtttttttgtaaagaattatttgttttctttaatcatttgcagaaaatcttacagtgttttgagctttttttggtagtttatcaaaaattagctgataactatttttaattaaagcaaattctgtttccgcttcgacatcatattcttcattaatcacaagtgtaatccaatgttttttatttaagtgatagccgggttttatactcatatattcatcgcgcaataaatcaattctctcaggctggcatttaacactgacatataaatccccgtgatacatatggatgagcgcaaatattttcgcgccaattgttaaagcatgtgttttagaatcaaatggaaatgtttccttagcaccttgcaaactaaggcaaagcgcgactttttcttgtaaagtttgctgataatccatttagcttccctccttatttttcaattataacatttatttatgcgtgtaagctttctttgctgaactaaccatgttaaaatagaagcaattgtgctttttctgatttcaagaagaagtaacttagtattggaggaagaaaatgttaactgtaaataatgttggcttacgctacggcgataaaaagctatttgaagatgtttcaattaaatttttaccaggtaactgttatggtcttattggagcaaacggtgctggtaaatcaacgttcctaaaagtgctttctggcgagcttgattctcaaagtggtaatgttcatattggttcaggtgagcgtctcgctgtccttcgccaagatcatttccagtatgatgatgaacttgttcttaacactgtaataatgggacatgaacgtctatacaaaattatggacgaaaaaaatgccatttacatgaaagaagatttcagtgatgaagatggtattcgcgctgctgaacttgaaggcgaatttgctgaattagatggttgggaagcagaatctgacgccgctgttttattaaatggcttaggtatccctactgacttacacggcaaactaatgaaagatttaactggtggagaaaaagtgaaagtgcttcttgcacaagctttattcggtaaaccagatatcttacttctggatgagcctaccaaccaccttgacatccgtgcgattcactggttggaagaatttttaatcaactttgataatactgttatcgtagtatcccatgaccgtcacttcttaaataaagtatgtacgcacattgcggatcttgatttcagcaaaattaaattatatgtcggaaactatgatttctggtatgaatcaagccaattagcacaaacaatgatgggcgatcgtaataagaaaaaagaagaaaaaatgaaagaattacaagactttattgctcgtttcagtgcgaacgcatcgaaatcaaaacaagcaacaagtcgtaaaaaaatgctcgaaaaaatcacgctggaagatattcaaccttctagtcgtcgttaccctttcattcagttcaaaccggaccgtgaagttgggaatgacctactaactgtaacaaacttgtctaaaacaattgatggcgtgaagattcttgataatctttccttctcgattaaccgtaatgacaaagttgctttagttggcgatgatgaagttgctaaaaccgttcttttccaaatccttgctggtgaaatggaacctgatgaaggtagctataaatggggcatcacaacaagccaaagctatttcccgaaagataactcagagttctttgaggaaaacgacatgagtcttgtggaatggttacgtcagttctctcctgaagatgatagtgaagcattcttacgcggcttccttggacgtatgctattcagtggtgatgaagtactgaaaaaagtacgcgttttatctggtggagaaaaagttcgttgtatgttatccaaaatgatgctttcaggttcaaatgttcttttacttgatgaacctactaaccacttggacttagaatcgatcactgcattaaataatggtcttgaagcgttcaaaggcgctatgatctttgcatcgcatgaccatcagttactacaaactatcgcaactcgtattattaacttatcaaaagatcaattttataataaagaaatttcttatgatgaatatttaaaagaagttatgaatgtagctgaataaataaaaaaacaatatcccatttccgggatattgtttttttatttaagttcgattttacctgtttctgttgtaattggtgtcgaagaatcttttaaatagcttaggaaactataagaaatccaagtaatatcagaaactttatctaatttttctactggaaaaacgattgttccttttactgttttaccaggttcgatttctgtggtttcaaaatcagatagaacagcgtctcctccatttatatccattttattagcttcaagttgaccttggtttggataggtttcgagagttttagctgcattgtttgttatttctaattgtaatgtgatactgccaggaactgacttgccttctactgttgaataggtttctttcttttcgaccgtgacagaggtgatttttttcttaatattatctgcggaatcttcatagtttatttgataggtttttgtttcttctgcagtagcttggcttgtacctttagaagaataattgaatacatcattttgaacttgttggtaatgtgaaaaactaacaatgatgccaataatagaaccaaccaataataacattccagcgcttgttaaaattgcaccgatttttcgcttggctgggaaaaataaaacaacaataccgctgataaaaattaagaatgcacatattccggcaataatccaaatttccatctaatttgctccttttatgcgaatttctccctcactataacatatttaagctctagttcaaagcagttaaatcacttgcaggtgatggatatgcaaatatgacagactgtaaatcagccaaagttaagttagctttcattaggatagcgatataatttatcatataatcagcctcttcacttaggaagtgagcgcctttaatttgaccagtttcgcggtcttctatgatttttgcgagggcgattttttcgttcgttcttctgtacgtataccagttcgttgtatcatggtttttaatttgatatttttctggattggcgtttgcttcttccatgcttatgccaatgcttgcaagttttggactagtaaaaacaacgcttggtatggcaggataatcgattttttcattgccgcctaaaatattttttgctactaatgctgcttccatactgacaactggtgttaacggagcgccttttgtagcggctacatcaccacatgcataaatatgtgggtggttaggtgtttgtagtttctcgtttactgtaatgccttttttggtatagtctatgtttgctttatctagagctaaatgagcaatattgggcgtccttccggttgctccgataattaagtcggtttcaagtgaaaagccatttttaccttcgatatgaagtttttcaccatttttattaattttagtaatatcagtatcaaaatggaaatgaatgccttcttcttttagtgtagcaactaaggcagctacaaaatcgggatcgaatttctttaatggttcgctattatgatgaattatatgcacatctcgccctgcagctagcgcaattgatgcaaattcaaaagaaatataaccaccgccgataaaaacaaccgaatctggaagtttttcaagtgataagaaatcatcactcgtttgaatatgttcttgaccttctactttaagtgtatttggtgttgcgccggttgcaatcactatttttttagcacttagtatgtcgttaccaacttgcaaagtattttcgttttgaaaacttgctggtccgaaaaacgtttcaatcccagcttcttgaaaactttccaagcgactttcaggcacatcttctacaaatgtttctttgaatgccattaaatctgtccagctaattgttgctgcttctttaatacctttaccacgtaatcttgtggaaagatttcttgcttctgctgctccgactaacacttttttagggtcacagcctctaaggacacatgtgccgccccaactacgctcttccacaatcgctacttttagaccggctgcctgcgcttcaaaagccacggttgttccactagcaccacttccgattataactacatcatatgtaaattctgtcaattgaatcactccttcctagcttgttttcccctctattttacttttaaacgaaaaaaactgctgcacatcgaggtgcagcagttcatactagacttccataatgattggtaagatcattggacgtcgttttgtttgctcaaataggtagcgatttaattgatcgcgaatatcttgttttaatttagcccattcaaagccagtttcttggaggtttttttcgacgatttttgttacgactttggatgattcttcaattaaatgctcagattcacgcacatagataaagccacgtgaaatgatttctggtccggaagtaattgttttagttttacgattaagcgtaacaactacgatgaaaataccgtcttcagaaagtaacttacggtctctcagtacgatgtttccaacgtctcctacacctaacccatcaattagtgtatttccagaatagacacggtttccagcagtcattttatcatttttatattctaaaatttcacctttaccgacaataaatacttctgattttgccatgccaacttcatgagctaatttcgcatgactaattaacatccggtattcaccgtgaacaggaacgaaatatctaggttttaacaagttaagcattaatttcaaatcttcttggcttgcatggccagagataaaaagattattactcatcgttaatacttttgctccagctttatagagcatatccatcgttttcgccatcatcgtttcaagtgatggtgacggtgttgttgtaatataaaccgtatctcctggtttaatattaaattgagggtgattacctttagtcattagttgtaatgattgaattggttcacctaagtttcctgtttcaataatagtgatttcttcatcattatattttttaagttcttttagaggaataatcaagtcttcctcaataacgattttacctaagctacctgctatttcaaatacacgctctaattctttaccaacaatagcgactttacgcttagtagcaacggatgcgtcaagtacttgctgcaaacgaatcaaattagaagccacacaagcaacaataattctaccatctgccattctaaaagcatgtctaatttcttcttcaattaaactgtcgcttgatgtggtaccaggatgctctgcttctgaactatctgaaagtaaagcaagtactcctttttcaccaaattcggcaatatgacttaaatcagaagcatatccatctttggctgattgatcaaatttaaagtcaccagtataaatgatggaaccttcacttgtttcaagtacaatcccaaccgaatcaggaattgtatgcgtcgtacggaagaaagatacatcaattttagaaaaagataaggttgtttctgcatcaacaacatggaaatttttaaagcgtagtttgcggtgttctttaagcgctgactttgcaagtgcaattgttagctcagtaccgtaaacaggtgctttaattttttgaagtaagtatggcagtgcaccaatcgcatcttcatgaccatgagttaagaaaatggctttcactctgtctttgttttcttctaaatatttgaaatcagggataacaatatcaattcctagtaattcgttttctgggaacattaagcctgcatctaatataaagatatcttcgtctatttctactacatataaatttttgccactttcatcgacaccgccgagtggaatgatttttatgtttttcgctttttttattgtcaaagcgtagacctcctttgaactatttagaaagtccttctaatatagcttgtaatttcgttccttgttcagcattcaaatctacaagtggtaatcttacaggtccaacgctaataccttgttgatttaataagtatttagttggcgctgggtttggaacagagaaaagaccgttcattaatggtaataacgagcgatgtatacttgctgctttttttacgtccccactttcatacgcttgcatcatttcttgcatttcatttcctaccacatgacttgcaacggaaattacgccattccctccaactgctaaaattggcaaggttaagctgtcatctccactgtatacgaggaaatcatcggaagtttcagcaatgattttacttatattgtctaagttgccgcttgattctttaacaccaataatatttggtaattttgctaaacgaataattgtttctggttcgatattaacaacactacgtcctggaatattataaataactactggtaaatcagaagcttccgcaacagcaacaaaatgagcgtataaaccatcttgatttggcttgttataatacggcgcaacgactaagacagcatcaattccgcccaattctgctacttcttttgtaaaagcaatcgtttctgctgtattattagaacctgtgccagcgattaatttcgcgcgtcctgcatttgtttccaccacttggcggaataatttcattttttcatcatgtgacaaagttggagattcaccagttgttccagcgattactaaaccatctgagccgttatctattaagtgattcacgagatgatgaattctttttttgcatactttatttttttctgggtgaattggcgtgaccattgctgtaattactttccctaaatccatctttcatttcctccttacttaatttccaaacaaaatacgtcatgaagggcattgactgccgaaattaagtcttcttctcttactaatacccaaatagttgtatgactatccgctgattgtaaaattgggatgtttttttcggataatgctcctacgatttttgctgtaacaccaggaactccggttattccagcaccaacgatagaaacttttgcacagtcttcacgaaccgttgtttgtaagtttgcttcttctaaaagttgtttgacgacgcgacgtttttcttctgggactgtaaaaatgaccgaatcagttgatatattaataaaatctaggctaattcctgcatctgctaatattttaaaagtctgttgttgcgcctttacagtatcggttttcacaaaaatttgcgttaaatttgtaacgtgtgcaactcctgttaccattcgttcttttacatcgaaatgaccggaatcatccgctaaagatgtgacaagtgttcctgtgctttctaagtaagtcgaacggatacgcattggtactttagcagtcatcgctatttctactgcgcgcggatgaatgacttttgctccttggtaagccatattactaacttcattataacttactcgtggaagtgaacgcgcatgttcgacaatgcgtggatctgccgtcatcataccgtctacgtcagtgaaaatatcaatatagtctgcttgtaaagatacaccaagagctgcagcagaagtatcactgccaccgcgaccaagtgttgttatatccccgttttcagtgattccttgaaaaccagcaacaacagctacatcaagtgtttcaagcgctttttttaggcgctttgtatcgacttcggtgatttttgcatttaagtgattattagatgtaataatacctgcttgaccacctgaaaatgcttctgctttaatgtctgcctctcttaacatattagtaaagacagaagcagatatagtttctccaacagacagcaatgtatcttgctctctagcagttagtttagtatcttttgctcctataagttctaaaagtgtgtcggttgcatatggatccccgtaacgaccaattgcggacacaacaactacaactttatagccgtctttaagggcattttttatatggttaaaagccattagacgaattttttcattttggacggatgtgccgccgaatttttgtactatgattttcattacttacacctctaaataatcgctagtttgactaagctttcagcaatttgaatcgaattccatgcagcgcctttaagtaggttgtcggatacaatccacatatggaagcctttagaatcatcaatgtcagcgcgaacgcgaccaacaaacacttcttttttaccagcagcttgaatggcttgcggataaatttgatttgccggatcatcttcaagaacgacaccaggagctgtttttaatgcattttgaatatcttttgcacttactccctcttgttctatttcaacgtaaacactttctgaatgtccactaacaactggaattcgaacgcatgtagcagaaactttaatagtatcgtcttccatgatttttttcgtttcattgatcattttcatttcttcgtatgtataatcattgtccgtgaaaacgtcaatttgtggtaaggcattgaatgcaattggatagtgctttttatcgccttttactggcatgatttctggcgtgaattctttgttatctaaaagagctctgctgccgtctttaagttcttgaatagcacttactccggagccagacacagcttgataagtagaaacaataattcgatttaaaccataagcttctcgaatcggttcgagtgctgctaccatttgaattgtagagcagttagggttagcaataatacctttatgtgagaatagcgctttttcgtttacttctggaacaacaagcggcacttcaggatccatgcgatatgcgctcgtattatcaattacaatggctccacgttttacagcttcttttgcaagtgctttagaaacggaacctccagcactaaataaggcaatatctacgccttcaaagctctcaggtgtagcttcttgaatagttacctcttccccacggaaggataatttttttccagcagaacgaatagaagacaagaacgaaacttgctttatcttgaaagtcgccgcctcttctagtaattcaatcatttgggtaccaactgcaccagtagcacctacaactgcgacatgatagctttttgtcatagtttacaattcctccttcaatttaatcctcgtatctctgctttaaaacagaaatctggttaattttacacttactttatcataccataaacaaagccatttcgcagttttttatctatattagtcaccatttttttaattgtttgtcagtttgaaatgtaaaaaaccactttcacaagaatgaaagtggttttttgattaattttcggtttgttcagattgtgcttttgcagctgcttctttattgttaattggttgttcaactttagaagcatctttattggattcagcacgttcttttttcagttcgaaatatttatcgaaaacttctttagaaatcttcatatttgttttttggtctgtaccatatggacgataaatccaaggtactactacagaaatcgctatttctggttttttaactggtgcataaccgacaaatgttgtattccaaacactggccattttgttaccttcttttggtccatcatagaaggcatcagctgttcctgttttacctgcaacgtcataatcactcgatgtaaagactgttctagctgtaccagttgagccatgagttacttcataaaaacctttttggactgttttgatgtcattatctgaaacgccgattttgtttaaaacttttggttcattagcggttgcaagagttccaacagaatcaccatttgtactaggattgcggatttcttttaccatacttggtgcaattctagatcctccatttgcgattgttgaaacgtattgcgccatttgaagcggtgtataagaatcatactgaccgatggcgaaatcgagaattttaccaattgtttggtcgtcccctttgtagccaacttgttctccaggaagatcaatacctgttttaacgcctaaaccaaattgattgtaataataacgcatatcatcaaatgtacttagtggagctcttagtggaccatttggaacatacttagcgccacccatcttcattgccacttgatacatatatgagttagatgagatttctagtgcgccaactggatccagtggtcggttacctgctccggttctattaaaccaagaacttttcggtttggttccttttaatgcaattggttggtcggtgaagaccgttttgtttgaaattgcgccgtccatgatgcccccaagaattgtggaacctttgacagcggaacccatcgcataagcagtggtgaatgttcctaaggagtagtcatcaaactcgcctttgtcatttagtttttgaccagcaagtgctagaacttctccagaatatgggtccattgcgactacaaatgcacgatcaaataagtcagaaccagcatattgtttaccttgtttaatatttttacgtaaaatatcttccacggctttctggaattctacatctacggaaagaactaagtcttttccttttgatccttcatacttacttactgtttcgattatatttcctttagagtcaagtacgctctcagattgggattttgaaccagctagaacgctttcgtattgggcttctaaataacttttaccaacacggtcatttcggctatatccttgagacaagtagtactcagctttatcttttggtagaccttcttttgctgtcgaaacagaacctaaaatagaacgtaatgtttcgtcataagtgtaatagcgattccagtctgtcgttgtatcaactcctggtaagctatccatgttttcactaacacgggcaatttcttcatctgttacatctttattcttaataacggactcagtcattgcgtatcctgttgtcatttttttataaattgttgctacttttaaatcttctgtagttagtttagctatatcatcgttcgttactttttcaacttggattttataagctttagaagattctagcgcttgttcttttgcagatagacgatttaaagactcggtttgatgtgtcaaaatccaataatctttcaaatcgcgatcggttagtttctctggttcaattgtaattaatttttgtaaagtttgagctacgtgaagtgtttctgaagtttctgtttgttggcttcttgtgtaggtaatcgatttgactgctgaattaccaactaataagttgtagtttcggtcataaatactgccacgtggaacattcttagaaacggtcacattatctgtttcttctaattgacgtttgtacgtatccccttgcacgatttgaacaataccaagtcgtaaaattaatacggagaataatataaaaattataaagaatagaatatttaaacgtagtggaatgatggcgcgtttcttcttagtggaatcttttttcttttttctaaaatttagtttcacgcaaagttacctcacttttcaataatacctttccctattgtagctgaaaaaacatcatttttccactgtaagttcattagaaattcattagaaataaaaaaagacccaccgaagtgagcctttctattattatttagctgcgtcaaagcgtttgttagcttcatcccagttaacaacattccaaaatgtgtcgatatattcaggacgacggttttggaatttaaggtaataagcatgttcccaaacatctaggcctagaacaggagtttttccatcgcttaatggagaatcttggtttgcagtagaaacgatttccagtttaccgttattaactactaaccaagcccagccagaaccaaaacgtgctgcagctgctgcattgaatttttctttgaaatcatcaaatgtaccgaattcgctttcgatagcagattttaagtcaccagttggagcgccgccaccatttgggctaaggatagaccaaaataatgtatggttagcatgaccgccaccgtggttacgtacagcgccgcgaatatcttcaggaacgctatctaagttagcaaccaattcttcaacaggtttctcagcaagttcaggatgacctgaaaccgcttcgtttagttttgttacataagtattgtggtgctttgtataatgaagttccattgtttctttatcaaaatttggctccaaagcatcataagtataaggtaatttaggtaattcgtaagtcattaaaaattcctccttgtattgtttttattttacgtgaaaagaaattacttataaggcgaaagatatacatcctattcctatagaactagttaacgccataaataacgtttctctttacaccatttagcctaccacgacctagaaacgcttgcaatttttctgctcagtgatgtttcaatattgattttgcattcatttcaagctatgattaagtttaggtggaaaaattacgttcttttgcacatacatgtatctttttccctgaaaatgaaaagttaaaccattaggtgaggtgttgaaaaaagaatgaatatttttaaacgcttctggaagagtttgtattcccctgcggatattgcttcgtttcgaaatgataaaattagaaaaagtatcgtttacattattgttttatcatttgttactttccttccattagcatattttacaaacgttacgacaaaaaatgcgctgaaagtcggcgaagaaacaattacaaatgaaattcctgattttaaagtcacagatggaaaattagtcttaacggacaattctgtcaaaaatatacccatctctattgaccaagatgaattacatatttattttgatgcctctggaactttagataaagatgatgttgataataaaattgcttcttatgatagcgcagttgcttttttatcggatagtatctatataactgctgctggtgtttctcaatctgtaagttatgatacggctggaattagtaataaagctgatttagtgaatttatatacgtccattgaatctctagcgaaatactttattcctattgccttgcttgttctgttcatctttacgcttggatcgattttcttccgagtagctctttatgcgttatttggatttattctttctggtttcggtcggacgggtattgctttccgtcaaaactggatgatagcttcttatagtattacattagctgctgttttcacgatggttatggaggctttacaagtaattgttccttttggaatggaaatcaatatggttgtaagtatgatctttgtattccttgcaattcgctcgattccaccaagcgaaccaactattttagaaaaatgataacttaaccacttgcgctttatgcaggtggtttttttgtgcaaaatgcagatgatttcctattagaaaagtggtatgattagaaaattaaaactaaaaggagcaattgctttgaacgagcgcacatgaagatttgaccttttaggaaaatagaatatataacttttagcctaacattaaggctcctagttttttattttaagggggagtttttttggaaaaagaaatcgaacttagtttttatgatggtgtgaaggcttgtttgccaactgtactaggttatgctggtattggaatagctgctggtgttgttggaagggcttctcacttaagcgtcttagaagtaacgttactcgctattatcgtctatgctggagctgctcagtttattatttcgggattattattattacaaagccctatttcagctattatttttactacttttttaattaattcacggcattttttgatgagtatggccgaagctcctcattttaaaaagtattcccttttgaataacattgggattggggcgcttctgacggacgaaacatttggcgtttcaatgaatcaaattggcaataaaaaaccagttagcgcaaaatggatgcacggaattaacgtaacagcctacatagcttggattgccgcttgtattttaggttctttcattgggaattggttgccaaatccagaacagtttggtcttgattttgcgttatcagcaatgtttatcggcttgctctatttacaagtcgttagcgataaaagtaaaaaaatcgcgacaagtttagttattatgttaatggtcgcgattttattaatcgtgtttatgcgttttatgacaccagaattagccattttagcggctaccttacttggttgtttgattggagtgatagttgaaaaatggcaataagtaattatacgttactcgttattttaggctgtggtttagtgacatttattccacgtgtcttaccttttatcttcgttcgaaagctgcaactacccagtgttgtgattcgctatttatcgtatgtaccgttatgcatactgactgctcttttcgttcaaagtcttcttattacaaacgaaaatagttttcctagcattaatattgaaaacctacttgccacgttaccaactatcattacagctattttaacgaaaaatttaatgtggattgttattgtaggaattatatcaatggctgttattcgtttggtcatatagaaaagccctttactggagtgtgtttttgacgggaatcaaaaccagtaaagggctttttttattggtggatctgaagtaactttaattagatgtggatgttgaactagaagatgaagtgcttgtatagtcagcaaatgcatcttttaaatcactatctttaatatcgatattagctgcttttaattcttttttaagggcagctgtcatattttcagaagttaattgagattttatataggctgcttttacgtttgctttttcttttgcataagtgcctttttctgttttcttcactaattgaattagatggtagccgtaagtagatttaacaattccacttacatcatctttatttttaagtgcataagcagctttttcaaaagtttcatccatttcaccaggaccaaatggatctaatagtccgccatttgtgctagttgcagtatctgttgagtactctttagctaagtcagcgaatttctcaccatttttcaatttagtttgaatttctttggctgttgcttcatcatctactaaaatatgacgcacagtgatgtttggctcccaagttttgtagtatgtttttagtttactttcacttacattcatatttgcttctgttgctttttgaactagaaggttatactctaaattttctttgaaagaagtttttgttaaattattggacgataaggttgattcaaatgagtcaccgtactgttcttcgtattttttatattctgcatttacttctttttcagtaacagtgtatttatcttctaagatttttttgaaagtaagttgttgcacgacctcattaccgtaagtcgttttcatcgcttcatatagctcgtcttgtgtgacatttcctgcatctgtttttactactgcactacttccgcacccagcgagtaaaagtagtgtcgctgctactagggaaatcatcactttttttaattttgtcaaactgttcctctccttcttctttcggctacttattactttaacgataaaaagtgtcgagaataagaaacaaatatgaaataactatgaacattatctgcaaaataaaaaaaggtcctgaatgcggaccttttttactattaagaggcttgtaaacattctgggcattcgccgtaaacctcaaatttatgaccatcaatttggtaaccaggtaaagcttctgttagaaaatccattgggcacatcataatttcttttgttttaccacatttcatacaaataaaatgatggtgatgatgctcatgtgtacacgccagacggaagtttcgttcaccagaaagatctgtttcttcaaaaatacctaactcaacaaataaggagagattacggtaaattgtatcaaaactaattcccggaaaatcgtctttcatattttctaacacatctttggctgttaaatatttatttttacgagctagtaagttaattagaaattcacgtttatcagtatgcttatagcccttttctttcattttcatgagcgcttcagttgctgtaagtcccattttcctcacctcgttttgaaattaatattttttgacgtattttttgatataaaatggtgatgattaaaagtaaaacagaaataatgacgattgccccaccaggagctaaatttaaataataagctgtaaataaaccgccgataaccgcaatttcaccaaataaaattgaaagtaagatagtttgtttaaatcctttggcaatccgaatcgctgctgcaactggcaatgtcattaaggatgatacaagtaaaataccaacgattcgcatggaagacgcaataactagagcgactaaaaccataaaaataatatcgaatattttagctttcaaaccggaaacttttgcatattcttcgtcaaatgataacaaaaatagctctttatataaggataatataacgataaatacgatgattgctgtaacaacgatcgtaatcatatcagtccgactcacggcacttacactaccaaatagataactaaataaatcagtattaaaaccattggctaaagaaataaagataacagaaaaacccattccagccgacataataatcggaatggctagttcttcaaaatgtttataaaccgtccgtaatttctccatcaataaagaaccaactacggaaaaaccaaaaccaagatataacggattaagtgctgctagtggcaaataagttttacttaaaaacaaactaaccgcaatcccacctaatgtcacatgactgagtgcatctgccattaacgaaagctttcttactacgatgaaacttccgagcagtggagcgataacaccaataacaataccaacgataaatgtattacgaataaaatcatactggagaagcgtcgcaatcaagacaagcatcctcccttctacgttgttctgctaatatttcaagttcgcggtcggccaaataatgttggtattcatgggctgaaccgtcaaaaataattcgtttattaatactaataacatgattaacatacgtattcactgcaactaaatcatgcgttacgagcaaaagcgtcatttcttctgtccggtttaattctgctaaaagttcataaaatgcttttacattttctacgtcgactccaacagtcggctcgtctaaaattaaaagctctggtctactaactagtgcacgcgcgataaaaacacgttgttgttgaccaccggaaagttcgccaatattgcgatgtagataatcagtcatttcaactcgcttcaaagcataatcaatagcttctttatcttgattattcaatgttttaaataagccttttttctttgttaaaccacttgcaacgacttctttcacagtagcaggaaaagcggaattaaaagcattcgatttttgagaaacaaagccaattttgacccaatctttgaaatctgcttgtttttctccaaataaagctatacttccttgttgttttttgagtacgccaaggattaattttaacatagttgatttacctgagccgttagggccgattaaaccagtaaaactgcctttttccacttgaaaatgaatgttttctaaggcatgttctttgtcataatggtaacttacattatttacttctatgattttgttcattcatgtttctcctttgacagcatttgctagccgcttttactagtatataaaagattggttaaaatgtaaatcgtaattacttcgaattaaaaaatagccaaaaaaacctggaaagcttggagcatttccaggttcggataattatttagcaaaagtatccgttaagattggaacaacttgttttttgcgagatacgacacctttaagtggtgcttgattttccacaaatttaacgccatatgcttcttctacaacggctgtcttggaaccaatagcaattccaaccgagtcattagtaagaatattagtgatgacaaataagtacaaatcaagtcctttatccacaatattttgtgtcataagtgcttcaacttctgcgcgacggctaagtacatcgtttacatcgacaacattgatttgagcgatttctactttgctaccgttcatgttgaattctttcgcatcaagtaatagttcagcaactgtttttttgctaacatcagctccagcttttagcatttccatgccgtatgcttgaatatcaacgtctgcaatgagtgctaatttttcagcagccactttatcttcttctgtgcacgttggtgattggaaaagaagtgtgtcagaaataattgcggaaagcattaagcctgcgactgttttacttacttctacttcattttcacggaacatttttagtaggattgtagtagtacatccaactggctcagctcggtagtatagtggatcagatgtctcgaaattagcgatgcggtgatgatcaacgactgcaactactgtcacatcgtcaatatcatccacactttgttggcgttcattatggtcaacaagtgcgacttcagaaacttcatttgcaacagtttcaactaagcgaggagctgttacttggaaataatcaagtacaaaagctgtttcactattaagctctcctaaacgaaccgcttcaatatctgctccttgtgctttttttaattctgcgtaactaatggcagaacaaatcgtatctgtatctggatttttatgaccgaatacaagtgtttttgtcattattttcgtctcctttttaactgttttgaattttatttaataaatctgggtcaaattcgccatttcttaacatggcgatttcccatttgtatggtgcttttttcgatgctttatcttcgccgacataaggcgtttcaaggatttttggaatgttcgataattgtggatgatgaacaatatagtgaagtgcatcaaagccgatatgaccaaaaccaatattagcatgacggtctttatgtgcgcctcgctcatttttactatcattgatatgtaacacttttaagcggtcaataccgataattttatcaaattcatttaacactccgtcaaaatcattgacaatatcgtaaccagcatcgtgtgtatgacatgtatcgaaagtaacggataataattcattatgagtcacaccgtcaataatttgtgctagttcttcaaaagtgcgaccacattcagaaccttttccagccattgtttctaaagcgatttgtacatcttgatcgtgtattaatgcttcgttaagcccttggataatttgtttaattcctttgtccgcaccttcaccgacatgcgcaccgggatgaagtacgatttgttttgcaccaagcgcacgcgtacgttcgatttcagattgtaagaaattaacgcctaattcaaatgtttctggcttaactgagttaccaatattgataatataaggcgcatgaaccacgatgtcagccatgtcgtgagctttcatgtgttctaagcctgcttcaatatttaactcttcaattggctttctacgcgtattttgcggagcgccagtataaatcataaacgtatttgagccgtaagaagctgcctcttcacttgcgccaagaagcattttctttccactcattgatacatgagaacctagtcttaacataaattcattcctcacttatcgttttttccgtctttcacgacgtttgatttcgttcattttataattaattttctttttataatttggcttacctttttgttttgcttttttacgcataccgatttcgcgcggatcagctgtttcgcgtttagcttcacgttttgcacggcgattgcggtcttctagtgtaacgaattctttatttttccaatcaacatgtttaaactcgatacccattttttcaagttgatttaggcgatcttcatctgacggttcaaataaagtaagtgcaatacctgaatgtcctgcacgtccagtccgaccagtacggtgaatataaaaatcgagatcatctggtaattcatagtttacaacatgactaattccttgaatatcaataccacgagcagctaaatctgtcgcaacaacatattgataatctaagttttcgatttgtttcatcgtccgtttacgttcacgaggatttacatcgccgtggattttcgctacttttagcccacgttcgattaaaccgttcgctacttcatcagcagttgtttttgtattagtaaaaacaatcgctaaataaggctgtgaaccaactaaaacatttttaagtaaatcaagtttattacggctacgagttgccataatacgatgttccactgtttttgaagcagcaacttttggttgaatgtgctcataacgtggattttccatatatttgcttaaaaatggttttaatttttgcggaattgtcgcggaaaaaacaagcatttgtaaattagcaggcatttttccagcaatatggtcgacatcgtttaagaagcccatatcaagtgtcatatctgcttcgtcaataactaatgttttagcagtatgaacaaataaggcttgttcgcgaattaagtcattaatacgacctggtgttccaacaataatttgtggttgttttttcagtttatcaattgcacgttgtttatccgtaccaccaataacgagttgaacagcgatttctttttcactaaatttcgttactttgcgaatttcattataaatttgagtagcaagctcgcgacttggtgccgtaataaccgcttgtactgcatctttttcaggattcacattgttaataattggcaaaataaaagtatgggttttccctgtaccagtttgagattggccaatgatactttcaccttttaaaatgcctgggattagcttttgttgtacttctgttggctcatagaatcctaatttatctattgcaagtccaataaaaggttgaaagccaaattggtcaaaccttgatttcttcgtcataaaatatttccactccgttctatacctagtagccattatagcacatattaggtcattcgtgcgcgcgataagacaactttgtcaaaacaatcaaatcgattatgctaattacagaattttttaaagaaataacgcaaaaaaacgactaatttccataaaagaaattagtcgtttttaattaacaaaattggaaaggatccgtattgacctctgaaacaataaattctgcttcataatctaaaattttagcttgctcttccattttgtttttcaagtagcctttcattactttttcaatattatgtccggcatcaatagtcggtaaattaatagctagtaaatcatgagctgtatgataataaacatctcctgtaatgaaaacatcggcgcctgtagcttttgcttggtgaataaatttatttccatccccaccaataatggctaccttttggacgttagcttttaaatctccgacaaaacgaacattatcaattgcgaaagctgttttcaacttatcaataaaagaaaccatactaatttttttaggtaaagttccgactcgaccaagtccttctttgtaagtctgtgtttcgagtgtatatacatcgattgctggttcctcatatggatgagcaattttcacagcttttgtgatggtttcagttaaatattgagggaaaatcgcttctattttaacttcaggaatagaagttaaagtttctttttcgccgatagttggatttgcgtctgtacctggtttaaatgaaccaattccagttgtatggaaagtacattctgtataatttgtgcctatttgtcctgctccattatttacaagtgctaaacggacagattctagttcattttccgggacataaacagcaattttgcaataaggttctgtataagtttcctcaatcatcgtagtatcttgtaaatgcagtaaatcagctaaaatatcattcactccgccttgagcaatatctaaattcgtatgcgcagcaaaaacggtaatatcgtgcttaataagttttttgatcattttaccttgtttcgttgttgtatcaatgtgttgtgttggacggtataagaacggatggtgcgcgattattaaatccactcttttttcaatcgcttcatccactacttcttctaatacatctaatgtaaacataacttttcttacttttttggataaatctcctacttgaaggccgattggatcgccttccattgctaattttttaggagcaattttttccattattgcggtatattcataaccatttgcgactttcattttagcacatcctctactaatgagattttatgttctaattcgcgaattttcgcttgattttcatctgatattggttgattactggagatagtttggataatattttgccatgtattagcttcatgacgccatttgcttttaaatatagctgattgttcttttaacaggcaaggaccgaaaaagatttcttgttttgtccaagtaatttctttttcagaaggctcaagaacgatgatttcatatattttattatcttcccgcaaaatagcttctgaagaaattaaccaattatttttttcggaccattctctaagttgccacgctgcaatatttggctgcaatatcagtttgcttactccagcaagtttttcagcgccttcctctaaaattgtacgaattaatgtaccacccatcccagcgataacaatagtatcaattttgtcatctttttcaataacctctaaaccatttccttttcttacatcgatttgatcagttaagccagaagtccgtacttgtttttgcgcagacttaaaaggtccatcgacaacttcacctgcgactgcgaaagaagctgttttatttttgattgcaaagcatggtaaatacgcgtgatcgctaccgatgtcagcaattcgttcgtttgtttttatgtaagaagctactttttcgagtcgcttcgatagttgttcctcgttcatttgattccctgctttccttttcattaaaaaggcaggagaacattttgtcctcctgcccggttgtgcattattccaggaagtcttttaattgtttgctgcggcttggatgacgtaatttacgtaaagcttttgcttcgatttgacgaatccgttcacgagttacgccaaacacacggccaacttcttctaaagtgcgcgtacgaccatcatctagaccaaaacgtaagcgaagaacattttcttcccggtctgttaatgtatcaagcacatcttcaagttgttcttttagtaattcataagctgcatgatcggacggtgaagtcgcatcttggtcttcaataaaatcaccaaggtgtgaatcgtcttcttcgccgattggtgtttcaagtgaaactggttcttgagcgatttttagaatttcccgaactttttcagttggtaggtccatttcttccccaatttcttctggtgaaggatcgcgccctaaatcttgtagcaatgaacgttgcacacgaattaatttgttaattgtttctaccatatgcaccggaatacggattgttctagcttggtccgcaatcgcacgggttatcgcttgacgaatccaccatgttgcataggtactgaatttaaatcctttgttaaagtcgaatttttcaacggctttcattagtcccatgttaccttcttgaatcaaatctaggaataacatacctcgaccgacataacgttttgcaatacttactacaaggcgtaggttggcttctgcaagacgaccttttgcttcaatgtcaccagcttcaatgcgtttcgctaaagctatttcttcatcggcagtaagtaagtctactcgaccaatttcttttagatacatgcgcactgggtcattaattttaacacctggtggcacactcatatctgttaaatcaaatgattcggtttcttcttttacaagttctgtttcatctggatcctcgtcgtctgcatcgtcagaaacttcaatgcctgcttcaccgacatgttctaaatactcatccatttgatcggaatctaaagtgaatggagctaatctggcagcgatttttgcataagttaaaatcccctttttcttaccttcttctatcagggcttcttttacttgctcaacattaagttcagcaactggttttgtgttttgtgttttatcactcataactgcctgtattcctccttccaaaatgccgctaaccttattaaaaggcttctcttaggtaataataccatcatttagcggttttaaaacgttattaatccaattgaccgctatttaacttacggttgagttggacgatttcaagcatcacgcgaatttcattttctttgtcgttttcacgattaaaagccgctagttgttgctcgagttctttctttgcttgttctaatttaaaacgtttgagacttttaatgtagtcttcaaactgtgttttaccttgttcatctggactaataaccatttctagactgcttataagtcctttcattcctgcatctggtacgctatccataaacttatgtggatctgcatcgttaccttcagcaaaatagccaattaaataggtatagagtgcttgatagttatcatgataaaattctgtatcacctagaagttgtttaatcaaaagaaaactatcccgattttccatcattgctttcatgagttgctgttctgcagtagtgtgtgcagataatttcttagttggttgctcaaaggaaaagagcatctctgagtcttcttgcggaatcatccccataaaagaatcatctattggtggttcattatagctatggttttgtcgttctttgtgtgtgttctttagcgattgttgcagttgttgttttaaagtttcaatagttaattcaaattcatctgctagttgctttaagtataattctcgttcaacagcttgatcaagcttagcaatttcgcgtaaacagtcatcaatataagcgattttatctgtttcgttttgcaaattacgttctttgcgtaaatagttgattttaaaagctgtccaagtcattcgttgttgtttgtagatttctttgaatttatctgcaccacttgctctaatgaagtcatctggatcttttcctgctgggagttgcaaaacgaaaacatctaaacgattacgctcaactaaaagcgttcctgctttatacgctgcttcaattccagctcggtccccgtcgtaacaaataattgcacgatttgtaaggcgcttaattaaatcagcatgttcttccgttaagcttgttcccatcgaagcaaccgcattttgaacgccagcttcttctgcggaaatgacatccataaagccttccataagcgtgatttcttcttgttttctaatagcctgtcttgcctctgaaaaatgaaataaagttcgtcttttattaaaaataggtgtttcaggactatttaaatattttggtccatcgtcacggtcaaacaaacgaccagaaaaagcattaatttgaccacgatcattcgtaattggaaacataattctattacgaaaacggtcaaccatttgcccatcatcacgttcagataaaagcccagccgtgccagccagttgcaaatccatccctcttttttcaagaaaagaagtgattgtggcatgatggtttggcgcaaatccaatttggaaggatgccatcatttgttccgacatacctcgttccttcaaatacgttaaagcagctgccccttcttctgtttccatcaaaatataatgatagagtttggctgtaagttggtgcatttcaaccattttggctgtttcagaagtttcttttggtaaattgcttgtatcacgttcttctggaagttcaatatcgacgtctaaatgactcatatccgcgacttttttgacagattctacaaacgttagcccatcatgttccattagaaatgaaaagacatttcctcctttaccacaaccaaaacaatgaaaaatttgtttttctggtgatacagagaaggaaggcgttttttcgccgtggaatggacataagccagaatagttacgaccttgtttttttaattggacataattaccaataatatcgactatatccgcttgattccggacttgatctattacttcttcaggaatccgcgccatcttgacagtcaactcctatttacttatttttgaaaaatgtagtcatccggtctttgaaaagcacacgatcttgatcgctcattgctttaggacctttgctatatttgccttgttgcctttctttggcatgtctatagcgaatatctaacattaatgacatttcttcttctcggtaaagttcgccccgatttgaaaagacatacgtaccttttgcaagtagaatgctagcaaggccaatatcttgcgttacgataatatcacctttgtttgctaaattcatcattcgcatatccgctgattctttgccagtatctacaaaaatccaattttctccgtttgtatttacagagtaatggttaaaagaagccacaaaaataacgtctaactgaaattgttcggcgacttgttttatttctgcttttaccgggcaagcatcggcatcaactaaaatttttggcacatattccatcctctcttaaaatctatgaaggcaagttaaaaaacgagtttttaacccgtttttttaatattattcgtagatttggctttttcacacgcgaatttagattatacgggaagtaactaatttttacaagcagtttttcccgtataatatatatattcgccataaaaagcaaaagtccttcttataattctaaattttcatcaacaatttcaccaatgtggattaaaatctcgtttgcagtctcttcaatggctttattagtcacatctaacacgaaacaatttaatttactggctagtttattaaaaatcgctaattcttcatcaattcgttgattacttgcataagtaccagcaccaggtaaaccaatcgaaattaaacgctcttgtctaatttttgttaatttttgtttactaatttttagaccaattatttttttagggtcaatttcaaaaagttcatctgggatttgtgcttctggaacgattggaatattgacgatttttaaacctttaagcgccaaatattgcgataaaggagtttttgaggttcttgaaataccaattaatacataatccgcttgcaaaatgcctcttggattacgaccatcgtcattctctacggcaaattcgattgcggctactttattgaaataagcttcatccatcgaacgaacgcggccaggttcagaaagtggtttaatcttgtaggtctcttctaactgatttaaaagcggcccaaataagtcaataatcggtacgccgaaagcttgagcagttttattaagctcttcacggacgctttcgagtacaatggtgtgcacgattatgccattgttcactgccactaggtcaacaatttcttcaatcatgtgagaagaatcgacgtggtgaaaacgatggataaacttcggtgtttgaccaaattgactaagtgctgctcttgtcacgagttcggccgtttctcctgttgaatcggaaaccacgtatacggctggttgagtcatacatacttcctcctctttgctcaaaatcttacttttattttacattaatttcatccatttgagcaaattctttaataaagcttgctagttcgaataaaagcgcaagacgattgttttttagttcatcgttatcagtcatcactagcgtattatcgaaatagccatcaattgttgtacgtaaatcagcaaatgctttaagtctatcaacaattgttaaaccagcataatcatattttagtttttctaatttatcgaatagctcttgttcgtattcattttcaaataggttcggatccacttctacgccatcttcgtattttttagaaattttaactactcgtgttaaagcttcgatagttggacggaaccactctgcatccgcatgtttatttaagatttgagcacgatctatcagttgcggaatcacatttggatctccgccgataacagcgtcaataatatcatgacgaatatgatgcccttgtaaaataacacgtagacgatttttcaagaaggtctgcacttcttttttcacatctgcacttggtaattcagtagcaccttctgcacgttccatgtccacaatacgagaaataacttcaagcattggaatgtcccaaccatttgcttggataatgcgcatcgccccaaaggcactacgacgtaaaccaaacggatcagcagaaccagttggtacaatatttacacagaagaagccaattaatgtttctaatttatccgcaatcgcgataagggaacctaggtctgtttgcggtaaaacgccttctgctgaacttggtaaataatgttcgcgaatggctgttgcgattgctggtttttcaccttgtaataaggcgtatttttcgcccattaaaccttgtaattctgggaattcaccaacgatattggttactaaatcaaatttataaatattagttaagcggataatgtcttgtttatcttcttcttgccaatttaagtaatcagcaagcatcaatgccactttttgcacacgttccattttttctgtcaaagtacctaatttttcatggaaaacgatattttgtaatttagcaactgcttcgtcaatggttatttttaaatcttcttgatagaagaaatcagcatctgacaaacgagcgcgtagtactttttcgtttcctcgtgccactgtatctagattttcatggttaccattacgaacggttacaaaatgaggcaataattctccttcttggctgaaaactgggaagtaacgttggtgttctttcatcgtcgtaattagaacttcttcaggtagttccaaatattctttttcaaaattacccgctaatacagttggatattcgacaagattagttacttcttctaataaatcgtcatcttctctgatttgccaattttccattgtttctagttcacgtaattgttctacaatagcctgtttgcgttcactagcattaacaacgacaaattgttctaataatgcatgtggatagtcgctcggttgattgattgtagctgtttttcctaagaaacgatgaccacgggaagtattactagttgagacaccagtgatttcaaatgggataatttcttcgccaaacattgcgataagccatttgattgggcgaatataacgtaaatcattactaccccagtgcatacttactgggaaagtcatacttgttactactttttctagacttggaagtaacgcggttgttttttcgccgattacttcttttttaatgtaaatatattccacacctttaatttcgcggaaagttaaatcttctggtgctactttttgactttttgcgaatcctaatgcagctttcgaccagttaccttcgtcgtctagagcgatttttttggcagggccttttgcttcttccacacgattagcttgttcttcagccatttcttctactaggacagttaaacgtcttggtgtagaataagttttaatttctttaaattcgatttggttgtcttttaaccaatctgttactcgtttttccagttgtaatacagaactagtcacatacttcgctggcatttcttctaaaccaatttctaataaaaagtctttactcatgacgttttcctccctcttctttgactaatgggaagccaagtttttctcgtgattcataaaatgttttggcgatacgtcttgctaagtttctgatacgaccgatatactgagcgcgttcagttactgaaacaacgccgcgagcatctagtaagttaaaggtatgcgaacattttaatacatagtcatacgctgggaaaactagtccttcttgcatttgacgagctgcttctctttcatatgtgtcaaaaagagttaatagcatatctgtattagaagtttcaaaggcatatttggagttttcgaattctgcttggaagaaaatatcgcgatagctaataccttctgtccattctaaatcaaatacattttctttatcttgaatatagcttgctaaacgttccacaccataagtaatttcagatgtaactgggaaacattctaagccgcctacttgttggaaataagtaaattgagtgatttccatcccatctaaccatacttcccatccaagtcctgcgcatcctaacgaagggttttcccagttatcttccacaaaacgaatatcatgttctaacgggttaattcctaatttttctaatgagccaaggtaaagctcttgaatgttgtcaggagaaggtttcatcactacttgaaattgatgatgttggaataatctgtttgggttttctccgtaacggccatctgctggacgacgagaaggctccacataacctgctttccaaggttctggaccaattgcttttaagaaagtataagggctcattgtaccagcacctttttccacatcatacgattgcaacataatacaatcttgttcggaccaataatcttgtaacgttctaatcattgtttgtaaattcattgcttccacctccaaaataattcagccaatataaaaactctcgtccctatatgctgatttaaagcatatagggacgagagttatctcgcggttccaccctatttggaatttaaacaattcccaccttgatttcgctgtactccagaacgccttcacaaaaagttaaatatccggctcacaccaaacccgaactcgctaaaaacagagctttttgttactattttccttcaatgtacctattagttgatatattaaaagatactgtatttttgcgaaaaagtcaatcatcgctatctttttttaacatattttcccatttatccatatcacgtaaaaatttcctgctttttaaatataaaccagaatattcgtcgtaataagtatcaatagctttttggagccattcttttgtttcttgtttcacatcaatattgcctaatcggtctaattgaaatataaaaaatagccttaaaagttttactacgttttccggtaaatgcatccggtagcggtctttatcaaagcagcgatggcaaataattccgttacttcttgttgaaaaatcaaaatgtcctgtcgtctccccgcaaatagcgcatttatccatagttgggtaaagtcctaacacaggtaacattttcatttcataaatttgggttagaatttgcggatcatatccttcatcaatgtcacgtaaaatttgaaaagttagctcatataaatatggatttggctggcgttcttcggttgctttatccaataactcgcatacataagtggcataagccgtcataaaaatatcttgttgaatggaagaaaaattttcgataacttctccttgttgaagcgtaccaagcccgtttcctccaaaaaaagtgaagtatccatttgtaaataattgtgttacagcagctaatctacttttggttttttttgcgccacgagcaaccacaccaatttttccaaattcacgtgtatacatgcggactattttatctgattcacgataactcgtctgtcgtatcacgattccttcgcatttttccatgtggcaaccctcctttttcattctttttattataacattttctaaacgattgtgtctttttatattttttgctatctttccgcgacttgctattgtaaaatagagaaaaaggcaagaaagaaaggattttttattctatggatatgttacttatattattgatcagcttgtttatactcacattcataggtgtagttgtgggaattattttgcttattgttagaaaggaaagatgggccggcattattgtcgctggattatcatttggtattggtttttatgtattgttagctgggttaaacttagcaacagttagtttacttcaaggctttaataatccattttctttttacggtggtagtggtaccgatgtttatactaatgattatgcagaaagctatgacgaagattattataatgattatacggatgtagattatggtgagcctgttgttttagaaaatgacagcactataactgtttataaacctgaagtgtctcaaaagaatgatggttatgatatttataaagtcaaagtgaaatttgaaaatacgggcactgaccctcttccgttttattcagaggatatctcgttgtacgatgatgcagcggaagattatggacaacaaattaccgaagatagtttcactggggatgttcagccaggtgaaacgaaagaattaacactttattatgaagtatataattttggtccttatagtatagagtatgacaattatagctggactgaataaataaaaagcatctggtacacaaatttgtgtaccagatgcttttttattaatattcttcgcggtcaaaaccataatcatgtaaataatgttctttgtcacgccaatttttttgaacttttacccaaatttctaagaatactttggagccgagcaaactttcaatttctttccttgctcgcataccaatttgcttaagcatttggccttgtttaccaataataatgcctttttgtgtacttctctccacaataatagttgcattaatagttagtttttctgttttaggatttttttcaataccttcaataactacagcaacagaatgcggtacttcttcacgcgttaattgtaacacttgctcacgaattaattcagaaataataaagcgttctgggtgatcggtaatttgatcttttggataatacattgggccgatttcaaggttagcattcgtttgttctaataaattaggaacattgtttccctcgagcgcagaaatcggaattatttcttcaaaatccataagttcccggtactgttcaataagttttattaaatcttctggggaaattaagtcaattttattaattaaaagaaatacaggtgtttggacgtttttaagcttttcaatgataaattcatccccgcggccaaaaccggtggaagcgtcgataacaaaataaatcaagtctacttcttgaaatgtgtttaaggcgattttcaccataaagtcgcctaatttatgttttggtttatgtattcctggtgtatcgatgaaaataatttgtgattcgtctgttgtaaatacgccttgaactttatttctagttgtttgcgctttatcactcataatcgcaattttttgaccaataatatggtttaataaagttgatttaccaacgttcggtcgcccaactatagcgacaaatcctgatttaaatggttcactcataacatatcctccgatgtgaatgcgcctggtaaaaggtctttcacagttaccgtcgctgtttttcctgttaagtttgttaaaattactggcatatctggcgcacaaaattcactaataacttgtctgcaagccccgcaaggcgatacaggtccctctgtatctgctactacaactaattgtttaaaatctctttttccttcagatacagctttgaaaattgctgtccgttcagcacagtttgttaagccgaaagaagcattttcgatattacaacctaacacgacttcatcatctttcgttacaagagctgctccaactggaaatttcgagtaaggaacatacgcaaattctcttgcttgtttagcgagtgagataaaattattttctttcatttaccaagtcacaatcccttctttttataaaaacatctgacaaaagtatggtatgaatataattagtccgataaaacttgccacaattgccgcaagtaagactgcaccagcagcaacatcttttgcttttttcgcttcatcaatgtattgctctgtcgcaacatccacggctctttcaatcgctgtattgaccatttctaacgttaatacaccaaaaatagatagaattaataaaatccattcagatctagtcacatgaaagaaaaagccacaaataactaccgcaagtgccgcaaatgtatgaaacctcatatttcgttcttctaaaaaagcagttttcagtccggtaaaagcgtgctgaaaggactctgcatagtttttactacgtttatactttctatctttcgagtccataagcatccaacacttctttttgtaagccaaacattactttttcctcgtcaggctccatatgatcataaccaagcaaatgcagtaatccgtgaactgctagaaaacctaattctcttgctttcgtatgtccgtaatctttcgcttgttcttctgctttttcagttgaaatgataatatcaccgagcattcgtggagtctcgaggtcaaaatctccccaatcaatttctgtttcgccgtcgcccatttcttctagcgcaaacgaaataacatctgttgcttggtctttattgcgatactctcgatttatctcttgaatgccttcgtttgtcgtaaatgtaagagagagttcagtgccttcctcgatttttaaataaccggctgcaaattgcagaatgttttcaactagctgtttatcttcatctggtaaattatttgtttcatccagtaagtctatttctaagaccgtcatcttttgtcctcctatttcaatctttgtcatcaggatattgaattcgttgatgatatattccgttcaatgtggcaattagagtgtcacgaataattttaatttctttgatggtaatagcgcattcagtaaattgcccatctaggaaacgatctttaataattccgtcgataatttctgttattttggccattgtaggttctgaggaagaacgaacagccgcttccacactatcagaaatattgattatcgcaatttcttttgtttgaggttttggcccactataacggaaatctgcttcttttacatccgggtttgtttctttagctttataataaaagtatttaagtaacgttgtcccgtgatgttgtaaagcaatatcaataatcggttgaggcatatggttttcttttaatatttccgccccgtctttagtatgcgaaagaattatatcacgactttgctctggtgtcagcctatcatgcgggttgattccttgtaattggttctccacaaaatacggcggacgtaatgttttaccaatatcatgataaaaacaaccaacgcggacaagtaaactatttgctccaattttatccgcacatgcttcagctaaattcgcaaccatcatgctgtggtgataagttcctggagctttcattaatattttcttgagcagtggatgattcggattcgctagttctactaatcggctcgtagttaataaaccaaaaatagtttcaaagagcggaataactccgacaccgagaataaatgcaccaaatcctcctaaaaaggcataaccaattgccattaaagtagacacttgaagtagcgtactattattaactaacaataaaatcaagacatataccatattgattaaacctaccataaagcctgaaaacatgatggcagaacgtcgactataatcccgtaaagctactacactcgtaattccacttaataaaatgaaaatcgcaattccactagttgaatcattttgaaatgcaaacaaactagttacagcaatatatagcacacttaaaaaggcatacttctcattcagtaagattttaagtatcatcggtgcaaatgctgctgggaataaaaaggcgatattagatatattctgattttctaaaaacaaaataatcattaacatgaataaagaaacgacatatacagaagaaaaaatcagcatcgtttgcattttttttgcttttgaaatggtttgtttttttgtatataagaatagaagtgctgcaagtgcaataataaaaacggcaaagccagcatattgtttgactggcattttttgatctaatagatgtagcatgtttaactgacgataggtttctcggtctacaatttgcccttcttgcacgataacttgaccttgtaaaattttcactggaacaacagattgggcagcttctttgcgccgttcatcagtttgttcttcattataaatttcatttgggacaattgcgtatgagacaagcactttggatacgtt
